(19) United States
(12) Patent Application Publication
(10) Pub. No.: US 2023/0312729 A1
(43) Pub. Date: Oct. 5, 2023

(54) EGFR ANTIGEN BINDING FRAGMENTS AND COMPOSITIONS COMPRISING SAME

(71) Applicant: AMUNIX PHARMACEUTICALS, INC., South San Francisco, CA (US)

(72) Inventors: Volker SCHELLENBERGER, Palo Alto, CA (US); Darragh MACCANN, Magherafelt (GB); James MCCLORY, Ballynaskeagh Banbridge (GB); Phillipp KUHN, Bremen (DE); André FRENZEL, Braunschweig (DE)

(21) Appl. No.: 17/621,978

(22) PCT Filed: Jun. 25, 2020
(86) PCT No.: PCT/US2020/039682

§ 371 Date: Dec. 22, 2021

Related U.S. Application Data
(60) Provisional application No. 63/043,486, filed on Jun. 24, 2020.
(60) Provisional application No. 62/866,749, filed on Jun. 26, 2019.

(51) Int. Cl. C07K 16/28; A61P 35/00

(52) U.S. Cl. CPC C07K 16/2863; A61P 35/00; C07K 16/2809; A61K 2039/505; C07K 2317/24; C07K 2317/31; C07K 2319/50

(57) ABSTRACT

The present disclosure related to antigen-binding units that specifically bind to EGFR or epitopes thereof. Some embodiments include bispecific anti-EGFR/anti-CD3 constructs with improved expression and/or stability. Related methods are also disclosed.

### CROSS-REFERENCE

[0001] This This application is a U.S. National Phase of International Application No. PCT/US2020/039682, filed Jun. 25, 2020, which claims priority to U.S. Provisional Application No. 63/043,486, filed Jun. 24, 2020 and U.S. Provisional Application No. 62/866,749, filed Jun. 26, 2019, all of which are incorporated by reference herein in their entirety.

### SEQUENCE LISTING

[0002] [0001.1] The instant application contains a Sequence Listing which has been submitted electronically in ASCII format and is hereby incorporated by reference in its entirety. Said ASCII copy, created on Jun. 25, 2020, is named 32808-779_601_SL.txt and is 2,131,102 bytes in size.

### BACKGROUND OF THE INVENTION

[0003] Many approved cancer therapeutics are cytotoxic drugs that kill normal cells as well as tumor cells. The therapeutic benefit of these cytotoxic drugs depends on tumor cells being more sensitive than normal cells, thereby allowing clinical responses to be achieved using doses that do not result in unacceptable side effects. However, essentially all of these non-specific drugs result in some if not severe damage to normal tissues, which often limits treatment suitability.

[0004] Bispecific antibodies can offer a different approach to cytotoxic drugs by directing immune effector cells to kill cancer cells. Bispecific antibodies combine the benefits of different binding specificities derived from two monoclonal antibodies into a single composition, enabling approaches or combinations of coverages that are not possible with monospecific antibodies. In one embodiment, this approach relies on binding of one arm of the bispecific antibody to a tumor-associated antigen or marker, while the other arm, upon binding the CD3 molecule on T cells, triggers their cytotoxic activity by the release of effector molecules such as such as TNF-α, IFN-γ, interleukins 2, 4 and 10, perforin, and granzymes. Advances in antibody engineering have led to the development of a number of bispecific antibody formats and compositions for redirecting effector cells to tumor targets, including bispecifics that function by recruiting and activating polyclonal populations of T cells at tumor sites, and do so without the need for co-stimulation or conventional MHC recognition. There remains, however, the dual problems of certain patients experiencing serious side effects referred to as “cytokine storm” or “cytokine release syndrome” (Lee DW et al. Current concepts in the diagnosis and management of cytokine release syndrome. Blood. 2014 124(2):188-195) mediated by the release of TNF-α and IFN-γ, amongst other cytokines, in addition to the fact that some bispecific compositions have a very short half-life, necessitating continuous infusions of four to eight weeks in order to maintain circulating concentrations within the therapeutic window for sufficient time to achieve a therapeutic effect, or have a variable effect. Thus, there is an unmet need in the field for the development of effective bispecific antibodies for use in cancer treatment.

### SUMMARY OF THE INVENTION

[0005] The present invention relates to anti-epidermal growth factor receptor (EGFR) antigen binding fragments incorporated into chimeric fusion proteins and methods of using or making the same. In one aspect, disclosed herein is a polypeptide comprising an antibody binding fragment (AF1), wherein the AF1 comprises light chain complementarity-determining regions (CDR-L), heavy chain complementarity-determining regions (CDR-H), light chain framework regions (FR-L), and heavy chain framework regions (FR-H), and wherein the AF1: a. specifically binds to epidermal growth factor receptor (EGFR); and b. comprises FR-H1, FR-H2, FR-H3, and FR-H4, wherein FR-H1 has an amino acid sequence of any one of SEQ ID NOS: 14-16, FR-H2 has an amino acid sequence of SEQ ID NO:18 or SEQ ID NO: 19, FR-H3 has an amino acid sequence of SEQ ID NO: 20 or SEQ ID NO:21, and FR-H4 has an amino acid sequence of any one of SEQ ID NOS: 22-24. In some embodiments, the AF1 comprises an amino acid sequence having at least 95%, 96%, 97%, 98%, 99% sequence identity or is identical to an amino acid sequence of any one of SEQ ID NOS: 37-51. In certain embodiments, the AF1 is a chimeric or a humanized antigen binding fragment. In one embodiment, the AF1 is selected from the group consisting of Fv, Fab, Fab′, Fab′-SH, linear antibody, and single-chain variable fragment (scFv).

[0006] In another embodiment, the AF1 comprises a variable heavy (VH) amino acid sequence having at least 90%, 91%, 92%, 93%, 94%, 95%, 96%, 97%, 98%, 99% sequence identity or is identical to an amino acid sequence of SEQ ID NO: 28-32. In certain embodiments, the AF1 comprises a variable light (VL) amino acid sequence having at least 90%, 91%, 92%, 93%, 94%, 95%, 96%, 97%, 98%, 99% sequence identity or is identical to an amino acid sequence of SEQ ID NO: 25-27.

[0007] In some embodiments, the AF1 further comprises CDR-H3, wherein the CDRH3 has an amino acid sequence of SEQ ID NO: 6. In certain embodiments, the AF1 further comprises CDR-H1, CDR-H2, and CDR-H3, having amino acid sequences of SEQ ID NOS: 4, 5, and 6, respectively. In certain embodiments, the AF1 CDR-L comprises CDR-L1, CDR-L2, and CDR-L3 comprising the amino acid sequences of SEQ ID NOS: 1, 2, and 3, respectively.

[0008] In other embodiments, the AF1 further comprises FR-L comprising FR-L1, FR-L2, FR-L3, and FR-L4, wherein a. FR-L1 exhibits at least 90%, or at least 95% sequence identity or is identical to amino acid sequence of SEQ ID NO: 7; b. FR-L2 exhibits at least 90%, or at least 95% sequence identity or is identical to amino acid sequence of SEQ ID NO:8; c. FR-L3 exhibits at least 90%, or at least 95% sequence identity or is identical to amino acid sequences of SEQ ID NOS: 9-11; and d. FR-L4 exhibits at least 90%, or at least 95% sequence identity or is identical to amino acid sequence of SEQ ID NO: 13. In certain embodiments, the FR-L comprise: a. a FR-L1 having an amino acid sequence of SEQ ID NO: 7, b. a FR-L2 having an amino acid sequence of SEQ ID NO: 8, c. a FR-L3 having an amino acid sequence of SEQ ID NO: 9, d. a FR-L4 having an amino acid sequence of SEQ ID NO: 13. In another embodiment, the FR-L comprises: a. a FR-L1 having an amino acid sequence of SEQ ID NO: 7, b. a FR-L2 having an amino acid sequence of SEQ ID NO: 8, c. a FR-L3 having an amino acid sequence of SEQ ID NO: 10, d. a FR-L4 having an amino acid sequence of SEQ ID NO: 13. In yet another embodiment, the FR-L comprises: a. a FR-L1 having an amino acid sequence of SEQ ID NO: 7, b. a FR-L2 having an amino acid sequence of SEQ ID NO: 8, c. a FR-L3 having an amino acid sequence of SEQ ID NO: 11, and d. a FR-L4 having an amino acid sequence of SEQ ID NO: 13.

[0009] In one embodiment, the FR-H comprises: a. a FR-H1 having an amino acid sequence of SEQ ID NO: 14, b. a FR-H2 having an amino acid sequence of SEQ ID NO: 18, b. a FR-H3 having an amino acid sequence of SEQ ID NO: 20, and c. a FR-H4 having an amino acid sequence of SEQ ID NO: 22 or 23. In other embodiments, the FR-H comprises: a. a FR-H1 having an amino acid sequence of SEQ ID NO: 15, b. a FR-H2 having an amino acid sequence of SEQ ID NO: 19, c. a FR-H3 having an amino acid sequence of SEQ ID NO: 21, and d. a FR-H4 having an amino acid sequence of SEQ ID NO: 24. In certain embodiments, FR-H comprises: a. a FR-H1 having an amino acid sequence of SEQ ID NO: 16, b. a FR-H2 having an amino acid sequence of SEQ ID NO: 19, c. a FR-H3 having an amino acid sequence of SEQ ID NO: 20, and d. a FR-H4 having an amino acid sequence of SEQ ID NO: 22 or 23. In some embodiments, the AF1 has at least one or at least two amino acid substitutions, relative to the amino acid sequence of SEQ ID NO: 52, of a hydrophobic amino acid in a framework region wherein the hydrophobic amino acid is selected from isoleucine, leucine or methionine and the substituted amino acid is selected from arginine, threonine, or glutamine.

[0010] In one embodiment, the polypeptide further comprises a first release segment peptide (RS1) and/or a first extended recombinant polypeptide (XTEN1), wherein the RS1 is a substrate for cleavage by a mammalian protease. In some embodiments, the fusion protein, in an uncleaved state, has a structural arrangement from N-terminus to C-terminus of AF1-RS1-XTEN1 or XTEN1-RS1-AF1.

[0011] In some embodiments, the RS1 is a substrate for a protease selected from the group consisting of legumain, MMP-2, MMP-7, MMP-9, MMP-11, MMP-14, uPA, and matriptase. In other embodiments, the RS1 comprises an amino acid sequence having at least 90%, 91%, 92%, 93%, 94%, 95%, 96%, 97%, 98%, 99%, or 100% sequence identity to a sequence selected from any one of SEQ ID NOS: 53-671. In certain embodiments, the RS1 comprises an amino acid sequence selected from the sequences of RSR-2089, RSR-2295, RSR-2298, RSR-2488, RSR-2599, RSR-2485, RSR-2486, RSR-2728, RSN-2089, RSN-2295, RSN-2298, RSN-2488, RSN-2599, RSN-2485, RSN-2486, RSN-2728, RSC-2089, RSC-2295, RSC-2298, RSC-2488, RSC-2599, RSC-2485, RSC-2486, and RSC-2728, each of which being set forth in Table 5.

[0012] In some embodiments, the polypeptide disclosed herein further comprises a first extended recombinant polypeptide (XTEN1), wherein the XTEN1 is characterized in that a. it has at least about 36 amino acids; b. at least 90%, 91%, 92%, 93%, 94%, 95%, 96%, 97%, 98%, 99% or 100% of the amino acid residues of the XTEN1 sequence are selected from glycine (G), alanine (A), serine (S), threonine (T), glutamate (E) and proline (P); and c. it has at least 4-6 different amino acids selected from G, A, S, T, E and P. In certain embodiments, the XTEN1 comprises an amino acid sequence that comprises at least three of the amino acid sequences of SEQ ID NOS: 672-675. In another embodiment, the XTEN1 comprises an amino acid sequence having at least about 90%, 91%, 92%, 93%, 94%, 95%, 96%, 97%, 98%, 99%, or 100% sequence identity to a sequence selected from any one of SEQ ID NOS: 676-734. In certain embodiments, XTEN1 comprises an amino acid sequence having at least about 90%, 91%, 92%, 93%, 94%, 95%, 96%, 97%, 98%, 99%, or 100% sequence identity to a sequence selected from the sequences of AE144_1A, AE144_2A, AE1442B, AE144_3A, AE144_3B, AE1444A, AE1444B, AE144_5A, AE144_6B, AE144_7A, AE284, AE288_1, AE2882, AE288_3, AE292, AE293, AE300, AE576, AE584, AE864, AE864_2, AE865, AE866, AE867, and AE868, each of which being set forth in Table 7.

[0013] In certain embodiments, the AF1 has a higher isoelectric point (pI) relative to that of an antigen binding fragment consisting of a sequence shown in SEQ ID NO: 52. In one embodiment, the AF1 is incorporated into the polypeptide to form an anti-EGFR bispecific antibody, the polypeptide exhibits a higher pI relative to a control bispecific antibody, wherein said polypeptide comprises said AF1 and a reference antigen binding fragment that binds to a cluster of differentiation 3 T cell receptor (CD3), and wherein said control bispecific antigen binding fragment is identical to the polypeptide except that the AF1 is replaced with SEQ ID NO:52 . In another embodiment, the AF1 exhibits a pI that is at least 0.1, 0.2, 0.3, 0.4, 0.5, 0.6, 0.7, 0.8, 0.9, or 1.0 pH units higher than the pI of the antigen binding fragment consisting of a sequence shown in SEQ ID NO:52. In certain embodiments, the AF1 exhibits a pI that is between 5.4 and 6.6, inclusive. In other embodiments, the AF1 exhibits a pI of about 5.4 to about 5.6, or about 5.5 to about 5.7, or about 5.6 to about 5.8, or about 5.7 to about 5.9, or about 5.8 to about 6.0, or about 5.9 to about 6.1, or about 6.0 to about 6.2, or about 6.1 to about 6.3, or about 6.2 to about 6.4, or about 6.3 to about 6.5, or about 6.4 to about 6.6. In another embodiment, AF1 exhibits a pI of about 5.4, or about 5.5, or about 5.6, or about 5.7, or about 5.8, or about 5.9, or about 6.0, or about 6.1, or about 6.2, or about 6.3, or about 6.4, or about 6.5, or about 6.6.

[0014] In certain embodiments, the AF1 specifically binds human or cynomolgus monkey (cyno) EGFR. In other embodiments, the AF1 specifically binds human and cynomolgus monkey (cyno) EGFR. In some embodiments, the AF1 specifically binds EGFR with a K_{d} between about 0.1 nM and about 100 nM, as determined in an in vitro antigen-binding assay comprising EGFR or an epitope thereof.

[0015] In another embodiment, the polypeptide further comprises a second antigen binding fragment (AF2) that specifically binds to cluster of differentiation 3 T cell receptor (CD3). In certain embodiments, (1) the AF2 fragment is selected from the group consisting of Fv, Fab, Fab′, Fab′-SH, linear antibody, a single domain antibody, and single-chain variable fragment (scFv), or (2) the AF1 and AF2 are configured as an (Fab′)2 or a single chain diabody.

[0016] In some embodiments, the AF2 is fused to the AF1 by a flexible peptide linker. In certain embodiment, the flexible linker comprises 2 or 3 types of amino acids selected from the group consisting of glycine, serine, and proline.

[0017] In some embodiment, the AF2 comprises a variable heavy (VH) amino acid sequence having at least 90%, 91%, 92%, 93%, 94%, 95%, 96%, 97%, 98%, 99% sequence identity or is identical to an amino acid sequence of SEQ ID NO:766 or SEQ ID NO:769. In certain embodiments, the AF2 comprises a variable light (VL) amino acid sequence having at least 90%, 91%, 92%, 93%, 94%, 95%, 96%, 97%, 98%, 99% sequence identity or is identical to an amino acid sequence of any one of SEQ ID NOS: 765, 767, 768, 770, or 771. In another embodiment, the AF2 comprises an amino acid sequence having at least 95%, 96%, 97%, 98%, 99% sequence identity or is identical to an amino acid sequence of any one of SEQ ID NOS:776-780.

[0018] In certain embodiments, the AF2 comprises light chain complementarity-determining regions (CDR-L) and heavy chain complementarity-determining regions (CDR-H), and wherein the antigen binding fragment comprises CDR-H1, CDR-H2, and CDR-H3, having amino acid sequences of SEQ ID NOS: 742, 743, and 744, respectively. In some embodiments, the CDR-L comprises: a. a CDR-L1 having an amino acid sequence of SEQ ID NOS: 735 or 736, b. a CDR-L2 having an amino acid sequence of SEQ ID NOS: 738 or 739, and c. a CDR-L3 having an amino acid sequence of SEQ ID NO:740.

[0019] In other embodiments, the AF2 further comprises light chain framework regions (FR-L) and heavy chain framework regions (FR-H) wherein AF2 comprises: a. a FR-L1 having an amino acid sequence of SEQ ID NO: 746; b. a FR-L2 having an amino acid sequence of SEQ ID NO: 747; c. a FR-L3 having an amino acid sequence of any one of SEQ ID NOS:748-751; d. a FR-L4 having an amino acid sequence of SEQ ID NO:754; e. a FR-H1 having an amino acid sequence of SEQ ID NO:755 or SEQ ID NO:756; f. a FR-H2 having an amino acid sequence of SEQ ID NO:759; g. a FR-H3 having an amino acid sequence of SEQ ID NO:760; and h. a FR-H4 having an amino acid sequence of any one of SEQ ID NO:764. In another embodiment, the antigen binding fragment comprises: a. a FR-L1 having an amino acid sequence of SEQ ID NO: 746; b. a FR-L2 having an amino acid sequence of SEQ ID NO: 747; c. a FR-L3 having an amino acid sequence of SEQ ID NO: 748; d. a FR-L4 having an amino acid sequence of SEQ ID NO: 754; e. a FR-H1 having an amino acid sequence of SEQ ID NO: 755; f. a FR-H2 having an amino acid sequence of SEQ ID NO: 759; g. a FR-H3 having an amino acid sequence of SEQ ID NO: 760; and h. a FR-H4 having an amino acid sequence of SEQ ID NO: 764. In yet another embodiment, the antigen binding fragment comprises: a. a FR-L1 having an amino acid sequence of SEQ ID NO:746; b. a FR-L2 having an amino acid sequence of SEQ ID NO:747; c. a FR-L3 having an amino acid sequence of SEQ ID NO:749; d. a FR-L4 having an amino acid sequence of SEQ ID NO:754; e. a FR-H1 having an amino acid sequence of SEQ ID NO:756; f. a FR-H2 having an amino acid sequence of SEQ ID NO:759; g. a FR-H3 having an amino acid sequence of SEQ ID NO:760; and h. a FR-H4 having an amino acid sequence of SEQ ID NO:764. In certain embodiment, the antigen binding fragment comprises: a. a FR-L1 having an amino acid sequence of SEQ ID NO: 746; b. a FR-L2 having an amino acid sequence of SEQ ID NO:747; c. a FR-L3 having an amino acid sequence of SEQ ID NO:750; d. a FR-L4 having an amino acid sequence of SEQ ID NO:754; e. a FR-H1 having an amino acid sequence of SEQ ID NO:756; f. a FR-H2 having an amino acid sequence of SEQ ID NO:759; g. a FR-H3 having an amino acid sequence of SEQ ID NO:760; and h. a FR-H4 having an amino acid sequence of SEQ ID NO:764. In yet another embodiment, the antigen binding fragment comprises: a. a FR-L1 having an amino acid sequence of SEQ ID NO: 746; b. a FR-L2 having an amino acid sequence of SEQ ID NO: 747; c. a FR-L3 having an amino acid sequence of SEQ ID NO: 751; d. a FR-L4 having an amino acid sequence of SEQ ID NO: 754; e. a FR-H1 having an amino acid sequence of SEQ ID NO: 756; f. a FR-H2 having an amino acid sequence of SEQ ID NO: 759; g. a FR-H3 having an amino acid sequence of SEQ ID NO: 760; and h. a FR-H4 having an amino acid sequence of SEQ ID NO: 764.

[0020] In some embodiments, the polypeptide further comprises a second release segment (RS2) and/or a second extended recombinant polypeptide (XTEN2), wherein the RS2 is a substrate for cleavage by a mammalian protease. In some embodiments, the sequences of RS1 and RS2 are identical. In another embodiment, the sequences of RS1 and RS2 are not identical.

[0021] In some embodiments, the polypeptide has a structural arrangement from N-terminus to C-terminus as follows: XTEN1-RS1-AF1-AF2-RS2-XTEN2, XTEN1-RS1-AF2-AF1-RS2-XTEN2, XTEN2-RS2-AF2-AF1-RS1-XTEN1, XTEN2-RS2-AF1-AF2-RS1-XTEN1, XTEN2-RS2-diabody-RS1-XTENI1, or XTEN1-RS1-diabody-RS2-XTEN2, wherein the diabody comprises VL and VH of the AF1 and AF2, wherein the AF2 specifically binds CD3 and AF1 specifically binds EGFR, and wherein XTEN 1 and XTEN2 are of the same or different amino acid length or sequence.

[0022] In certain embodiments, the RS2 is a substrate for a protease selected from legumain, MMP-2, MMP-7, MMP-9, MMP-11, MMP-14, uPA, and matriptase. In other embodiments, the RS2 comprises an amino acid sequence having at least 90%, 91%, 92%, 93%, 94%, 95%, 96%, 97%, 98%, 99% sequence identity to a sequence selected from SEQ ID NOS:53-671. In certain embodiments, the RS1 and RS2 are each a substrate for cleavage by multiple proteases at one, two, or three cleavage sites within each release segment sequence.

[0023] In some embodiments, the XTEN2 is characterized in that a. it has at least about 36 amino acids; b. at least 90%, 91%, 92%, 93%, 94%, 95%, 96%, 97%, 98%, 99% or 100% of the amino acid residues of the XTEN1 sequence are selected from glycine (G), alanine (A), serine (S), threonine (T), glutamate (E) and proline (P); and c. it has at least 4-6 different amino acids selected from G, A, S, T, E and P. In certain embodiments, the XTEN2 comprises an amino acid sequence having at least about 90%, 91%, 92%, 93%, 94%, 95%, 96%, 97%, 98%, 99%, or 100% sequence identity to a sequence selected from SEQ ID NOS: 676-734. In other embodiments, the XTEN2 comprises an amino acid sequence having at least about 90%, 91%, 92%, 93%, 94%, 95%, 96%, 97%, 98%, 99%, or 100% sequence identity to a sequence selected from the sequences of AE144_1A, AE144_2A, AE144_2B, AE144_3A, AE144_3B, AE144_4A, AE144_4B, AE144_5A, AE144_6B, AE144_7A, AE284, AE288_1, AE288_2, AE288_3, AE292, AE293, AE300, AE576, AE584, AE864, AE864_2, AE865, AE866, AE867, and AE868, each of which being set forth in Table 7. In certain embodiments, the XTEN2 comprises an amino acid sequence that comprises at least three of the amino acid sequences of SEQ ID NOS: 672-675.

[0024] In some embodiments, the Tₘ of the AF2 is at least 2° C. greater, or at least 3° C. greater, or at least 4° C. greater, or at least 5° C. greater, or at least 6° C. greater, or at least 7° C. greater, or at least 8° C. greater, or at least 9° C. greater, or at least 10° C. greater than the Tₘ of an antigen binding fragment consisting of a sequence of SEQ ID NO:781, as determined by an increase in melting temperature in an in vitro assay.

[0025] In some embodiments, the AF2 binds a CD3 complex subunit selected from any one of CD3 epsilon, CD3 delta, CD3 gamma, CD3 zeta, CD3 alpha and CD3 beta epsilon. In one embodiment, the AF2 specifically binds human or cynomolgus monkey (cyno) CD3. In yet another embodiment, the AF2 specifically binds human and cynomolgus monkey (cyno) CD3.

[0026] In other embodiments, the AF2 specifically binds human or cyno CD3 with a dissociation constant (K_{d}) constant between about 10 nM and about 400 nM, as determined in an in vitro antigen-binding assay. In certain embodiments, the AF2 specifically binds human or cyno CD3 with a dissociation constant (K_{d}) constant between about 10 nM and about 400 nM, or between about 50 nM and about 350 nM, or between about 100 nM and 300 nM, as determined in an in vitro antigen-binding assay. In certain embodiments, the AF2 specifically binds human or cyno CD3 with a dissociation constant (K_{d}) weaker than about 3 nM, or about 10 nM, or about 50 nM, or about 100 nM, or about 150 nM, or about 200 nM, or about 250 nM, or about 300 nM, or about 400 nM, as determined in an in vitro antigen-binding assay. In other embodiments, AF2 specifically binds human or cyno CD3 with at least 2-fold, 3-fold, 4-fold, 5-fold, 6-fold, 7-fold, 8-fold, 9-fold, or at least 10-fold weaker binding affinity than an antibody-binding fragment consisting of an amino acid sequence of SEQ ID NO: 781, as determined by the respective dissociation constants (K_{d}) in an in vitro antigen-binding assays. In yet another embodiment, the binding affinity of the AF1 to EGFR is at least 10-fold greater, or at least 100-fold greater, or at least 1000-fold greater than the binding affinity of the AF2 to CD3, as measured in an in vitro antigen-binding assay.

[0027] In certain embodiments, the AF2 exhibits an isoelectric point (pI) that is less than or equal to 6.6. In another embodiment, the AF2 exhibits a pI that is between 5.5 and 6.6, inclusive. In other embodiments, the AF2 exhibits a pI that is between about 5.5 and 6.6, or about 5.6 and about 6.4, or about 5.8 and about 6.2, or about 6.0 and about 6.2. In some embodiments, the AF2 exhibits a pI that is at least 0.1, 0.2, 0.3, 0.4, 0.5, 0.6, 0.7, 0.8, 0.9, or 1.0 pH units lower than the pI of a reference antigen binding fragment consisting of a sequence shown in SEQ ID NO: 781. In another embodiment, the AF2 exhibits a pI that is within at least about 0.1, 0.2, 0.3, 0.4, 0.5, 0.6, 0.7, 0.8, 0.9, 1.0, 1.1, 1.2, 1.3, 1.4 or about 1.5 pH units of the pI of the AF 1. In certain embodiments, the AF2 exhibits a pI that is within at least about 0.1 to about 1.5, or at least about 0.3 to about 1.2, or at least about 0.5 to about 1.0, or at least about 0.7 to about 0.9 pH units of the pI of the AF1.

[0028] In another aspect, the present disclosure provides a bispecific antigen-binding unit comprising: a. a first antigen-binding fragment (AF1) wherein the AF1 specifically binds to EGFR; and b. a second antigen-binding fragment (AF2) wherein the AF2 specifically binds to cluster of differentiation 3 T cell receptor (CD3); wherein a difference between an isoelectric point (pI) of the second antigen binding fragment and a pI of the first antigen binding fragment is from 0 to about 0.2, 0.3, 0.4, 0.5, 0.6, 0.7, 0.8, 0.9, 1.0, 1.1, 1.2, 1.3, 1.4, or 1.5 pH units, as determined by an in vitro assays. In some embodiments, the AF1 comprises a variable heavy (VH) amino acid sequence having at least 90%, 91%, 92%, 93%, 94%, 95%, 96%, 97%, 98%, 99% sequence identity or is identical to an amino acid sequence of SEQ ID NO: 28-32. In other embodiments, the AF1 comprises a variable light (VL) amino acid sequence having at least 90%, 91%, 92%, 93%, 94%, 95%, 96%, 97%, 98%, 99% sequence identity or is identical to an amino acid sequence of SEQ ID NO: 25-27. In certain embodiments, the AF1 comprises an amino acid sequence having at least 95%, 96%, 97%, 98%, 99% sequence identity or is identical to an amino acid sequence of any one of SEQ ID NOS: 37-51. In other embodiments, (1) each of the AF1 and the AF2 fragment is selected from the group consisting of Fv, Fab, Fab′, Fab′-SH, linear antibody, a single domain antibody, and single-chain variable fragment (scFv), or (2) the AF1 and AF2 are configured as an (Fab′)2 or a single chain diabody.

[0029] In some embodiments, the AF1 of the bispecific antigen-binding unit comprises light chain complementarity-determining regions (CDR-L), heavy chain complementarity-determining regions (CDR-H), light chain framework regions (FR-L), and heavy chain framework regions (FR-H), and wherein the AF1 comprises FR-H1, FR-H2, FR-H3, and FR-H4.

[0030] In other embodiments, the AF1 further comprises CDR-H3, wherein the CDRH3 has an amino acid sequence of SEQ ID NO: 6. In certain embodiments, the AF1 further comprises CDR-H1, CDR-H2, and CDR-H3, having amino acid sequences of SEQ ID NOS: 4, 5, and 6, respectively. In certain embodiments, the CDR-L comprises CDR-L1, CDR-L2, and CDR-L3 comprising the amino acid sequences of SEQ ID NOS: 1, 2, and 3, respectively.

[0031] In certain embodiments, FR-H1 has an amino acid sequence of any one of SEQ ID NOS: 14-16, FR-H2 has an amino acid sequence of SEQ ID NO:18 or SEQ ID NO:19, FR-H3 has an amino acid sequence of SEQ ID NO: 20 or SEQ ID NO:21, and FR-H4 has an amino acid sequence of any one of SEQ ID NOS: 22-24. In some embodiments, the FR-H comprises: a FR-H1 having an amino acid sequence of SEQ ID NO: 14, a FR-H2 having an amino acid sequence of SEQ ID NO: 18, a FR-H3 having an amino acid sequence of SEQ ID NO: 20, and a FR-H4 having an amino acid sequence of SEQ ID NO: 22 or 23. In other embodiments, the FR-H comprise: a FR-H1 having an amino acid sequence of SEQ ID NO: 15, a FR-H2 having an amino acid sequence of SEQ ID NO: 19, a FR-H3 having an amino acid sequence of SEQ ID NO: 21, and a FR-H4 having an amino acid sequence of SEQ ID NO: 24. In yet another embodiment, FR-H comprises: a FR-H1 having an amino acid sequence of SEQ ID NO: 16, a FR-H2 having an amino acid sequence of SEQ ID NO: 19, a FR-H3 having an amino acid sequence of SEQ ID NO: 20, and a FR-H4 having an amino acid sequence of SEQ ID NO: 22 or 23.

[0032] In certain embodiments, the FR-L1 exhibits at least 90%, or at least 95% sequence identity or is identical to amino acid sequences of SEQ ID NOS: 7; the FR-L2 exhibits at least 90%, or at least 95% sequence identity or is identical to amino acid sequences of SEQ ID NO: 8; the FR-L3 exhibits at least 90%, or at least 95% sequence identity or is identical to amino acid sequences of SEQ ID NOS: 9-11; and the FR-L4 exhibits at least 90%, or at least 95% sequence identity or is identical to amino acid sequence of SEQ ID NO: 13. In other embodiments, the FR-L comprises: a FR-L1 having an amino acid sequence of SEQ ID NO: 7, a FR-L2 having an amino acid sequence of SEQ ID NO: 8, a FR-L3 having an amino acid sequence of SEQ ID NO: 9, and a FR-L4 having an amino acid sequence of SEQ ID NO: 13. In yet another embodiment, the FR-L comprises: a FR-L1 having an amino acid sequence of SEQ ID NO: 7, a FR-L2 having an amino acid sequence of SEQ ID NO: 8, a FR-L3 having an amino acid sequence of SEQ ID NO: 10, and a FR-L4 having an amino acid sequence of SEQ ID NO: 13. In another embodiment, the FR-L comprises: a FR-L1 having an amino acid sequence of SEQ ID NO: 7, a FR-L2 having an amino acid sequence of SEQ ID NO: 8, a FR-L3 having an amino acid sequence of SEQ ID NO: 11, and a FR-L4 having an amino acid sequence of SEQ ID NO: 13.

[0033] In certain embodiments, the AF2 of the bispecific antigen-binding unit comprises light chain complementarity-determining regions (CDR-L) and heavy chain complementarity-determining regions (CDR-H), and wherein the antigen binding unit comprises CDR-H1, CDR-H2, and CDR-H3, having amino acid sequences of SEQ ID NOS: 742, 743, and 744, respectively. In some embodiments, the AF2 comprises a variable heavy (VH) amino acid sequence having at least 90%, 91%, 92%, 93%, 94%, 95%, 96%, 97%, 98%, 99% sequence identity or is identical to an amino acid sequence of SEQ ID NO:766 or SEQ ID NO:769. In other embodiments, the AF2 comprises a variable light (VL) amino acid sequence having at least 90%, 91%, 92%, 93%, 94%, 95%, 96%, 97%, 98%, 99% sequence identity or is identical to an amino acid sequence of any one of SEQ ID NOS: 765, 767, 768, 770, or 771. In certain embodiments, the AF2 comprises an amino acid sequence having at least 95%, 96%, 97%, 98%, 99% sequence identity or is identical to an amino acid sequence of any one of SEQ ID NOS:776-780.

[0034] In other embodiments, the CDR-L of AF2 comprises: a CDR-L1 having an amino acid sequence of SEQ ID NOS: 735 or 736, a CDR-L2 having an amino acid sequence of SEQ ID NOS: 738 or 739, and a CDR-L3 having an amino acid sequence of SEQ ID NO:740.

[0035] In other embodiments, the AF2 further comprises light chain framework regions (FR-L) and heavy chain framework regions (FR-H) wherein AF2 comprises: a. a FR-L1 having an amino acid sequence of SEQ ID NO:746; b. a FR-L2 having an amino acid sequence of SEQ ID NO:747; c. a FR-L3 having an amino acid sequence of any one of SEQ ID NOS:748-751; d. a FR-L4 having an amino acid sequence of SEQ ID NO:754; e. a FR-H1 having an amino acid sequence of SEQ ID NO:755 or SEQ ID NO:756; f. a FR-H2 having an amino acid sequence of SEQ ID NO:759; g. a FR-H3 having an amino acid sequence of SEQ ID NO:760; and h. a FR-H4 having an amino acid sequence of any one of SEQ ID NO:764. In certain embodiments, the AF2 further comprises a light chain framework region (FR-L) and a heavy chain framework region (FR-H), and wherein the antigen binding unit comprises: a. a FR-L1 having an amino acid sequence of SEQ ID NO: 746; b. a FR-L2 having an amino acid sequence of SEQ ID NO: 747; c. a FR-L3 having an amino acid sequence of SEQ ID NO: 748; d. a FR-L4 having an amino acid sequence of SEQ ID NO:754; e. a FR-H1 having an amino acid sequence of SEQ ID NO: 755; f. a FR-H2 having an amino acid sequence of SEQ ID NO: 759; g. a FR-H3 having an amino acid sequence of SEQ ID NO: 760; and h. a FR-H4 having an amino acid sequence of SEQ ID NO: 764. In other embodiments, the AF2 further comprises a light chain framework region (FR-L) and a heavy chain framework region (FR-H), and wherein the antigen binding unit comprises: a. a FR-L1 having an amino acid sequence of SEQ ID NO:746; b. a FR-L2 having an amino acid sequence of SEQ ID NO:747; c. a FR-L3 having an amino acid sequence of SEQ ID NO:749; d. a FR-L4 having an amino acid sequence of SEQ ID NO:754; e. a FR-H1 having an amino acid sequence of SEQ ID NO:756; f. a FR-H2 having an amino acid sequence of SEQ ID NO:759; g. a FR-H3 having an amino acid sequence of SEQ ID NO:760; and h. a FR-H4 having an amino acid sequence of SEQ ID NO:764. In another embodiment, the AF2 further comprises a light chain framework region (FR-L) and a heavy chain framework region (FR-H), and wherein the antigen binding unit comprises: a. a FR-L1 having an amino acid sequence of SEQ ID NO:746; b. a FR-L2 having an amino acid sequence of SEQ ID NO:747; c. a FR-L3 having an amino acid sequence of SEQ ID NO:750; d. a FR-L4 having an amino acid sequence of SEQ ID NO:754; e. a FR-H1 having an amino acid sequence of SEQ ID NO:756; f. a FR-H2 having an amino acid sequence of SEQ ID NO:759; g. a FR-H3 having an amino acid sequence of SEQ ID NO:760; and h. a FR-H4 having an amino acid sequence of SEQ ID NO:764. In certain embodiments, the AF2 further comprises a light chain framework region (FR-L) and a heavy chain framework region (FR-H), and wherein the antigen binding unit comprises: a. a FR-L1 having an amino acid sequence of SEQ ID NO:746; b. a FR-L2 having an amino acid sequence of SEQ ID NO:747; c. a FR-L3 having an amino acid sequence of SEQ ID NO:751; d. a FR-L4 having an amino acid sequence of SEQ ID NO:754; e. a FR-H1 having an amino acid sequence of SEQ ID NO:756; f. a FR-H2 having an amino acid sequence of SEQ ID NO:759; g. a FR-H3 having an amino acid sequence of SEQ ID NO:760; and h. a FR-H4 having an amino acid sequence of SEQ ID NO:764.

[0036] In some embodiments, the AF2 is fused to the AF1 by a flexible peptide linker. In certain embodiments, the flexible linker comprises 2 or 3 types of amino acids selected from the group consisting of glycine, serine, and proline.

[0037] In certain embodiments, the bispecific antigen binding unit further comprises a first release segment peptide (RS1) and a second release segment peptide (RS2), wherein each of the RS1 and RS2 is a substrate for cleavage by a mammalian protease. In one embodiment, he RS1 and RS2 are identical. In another embodiment, the RS1 and RS2 are different. In some embodiments, each of the RS1 and RS2 is a substrate for a protease selected from the group consisting of legumain, MMP-2, MMP-7, MMP-9, MMP-11, MMP-14, uPA, and matriptase. In other embodiments, each of the RS1 and RS2 comprises an amino acid sequence having at least 90%, 91%, 92%, 93%, 94%, 95%, 96%, 97%, 98%, 99%, or 100% sequence identity to a sequence selected from any one of SEQ ID NOS:53-671. In another embodiment, each of the RS1 and RS2 comprises an amino acid sequence selected from the sequences of RSR-2089, RSR-2295, RSR-2298, RSR-2488, RSR-2599, RSR-2485, RSR-2486, RSR-2728, RSN-2089, RSN-2295, RSN-2298, RSN-2488, RSN-2599, RSN-2485, RSN-2486, RSN-2728, RSC-2089, RSC-2295, RSC-2298, RSC-2488, RSC-2599, RSC-2485, RSC-2486, and RSC-2728, each of which being set forth in Table 5.

[0038] In some embodiments, the bispecific antigen binding unit further comprises a first extended recombinant polypeptide (XTEN1) and a second extended recombinant polypeptide, wherein each of the XTEN1 and XTEN2 is characterized in that it has a. at least about 36 amino acids; b. at least 90%, 91%, 92%, 93%, 94%, 95%, 96%, 97%, 98%, 99% or 100% of the amino acid residues of the XTEN1 sequence are selected from glycine (G), alanine (A), serine (S), threonine (T), glutamate (E) and proline (P); and c. at least 4-6 different amino acids selected from G, A, S, T, E and P. In one embodiment, the XTEN1 and XTEN2 are identical. In another embodiment, the XTEN1 and XTEN2 are different.

[0039] In certain embodiments, each of the XTEN1 and XTEN2 comprises an amino acid sequence that comprises at least three of the amino acid sequences of SEQ ID NOS: 672-675. In yet another embodiment, each of the XTEN1 and XTEN2 comprises an amino acid sequence having at least about 90%, 91%, 92%, 93%, 94%, 95%, 96%, 97%, 98%, 99%, or 100% sequence identity to a sequence selected from any one of SEQ ID NOS: 676-734. In other embodiments, each of the XTEN1 and XTEN2 comprises an amino acid sequence having at least about 90%, 91%, 92%, 93%, 94%, 95%, 96%, 97%, 98%, 99%, or 100% sequence identity to a sequence selected from the sequences of AE144_1A, AE144_2A, AE1442B, AE144_3A, AE144_3B, AE144_4A, AE1444B, AE144_5A, AE144_6B, AE144_7A, AE284, AE288_1, AE288_2, AE288 3, AE292, AE293, AE300, AE576, AE584, AE864, AE864_2, AE865, AE866, AE867, and AE868, each of which being set forth in Table 7.

[0040] In some embodiments, the bispecific antigen binding unit has a structural arrangement from N-terminus to C-terminus as follows: XTEN1-RS1-AF1-AF2-RS2-XTEN2, XTEN1-RS1-AF2-AF1-RS2-XTEN2, XTEN2-RS2-AF2-AF1-RS1-XTEN1, XTEN2-RS2-AF1-AF2-RS1-XTEN1, XTEN2-RS2-diabody-RS1-XTEN1, or XTEN1-RS1-diabody-RS2-XTEN2, wherein the diabody comprises VL and VH of the AF1 and AF2.

[0041] In some embodiments, the AF1 specifically binds human or cynomolgus monkey (cyno) EGFR. In other embodiments, the AF1 specifically binds human and cynomolgus monkey (cyno) EGFR. In certain embodiments, the AF2 binds a CD3 complex subunit selected from any one of CD3 epsilon, CD3 delta, CD3 gamma, CD3 zeta, CD3 alpha and CD3 beta epsilon. In another embodiment, the AF2 specifically binds human or cynomolgus monkey (cyno) CD3. In yet another embodiment, the AF2 specifically binds human and cynomolgus monkey (cyno) CD3.

[0042] In one embodiment, the AF1 specifically binds EGFR with a K_{d} between about 0.1 nM and about 100 nM, as determined in an in vitro antigen-binding assay comprising EGFR or an epitope thereof.

[0043] In other embodiments, the AF1 specifically binds EGFR with a dissociation constant (K_{d}) constant between about 0.1 nM and about 100 nM, or between about 0.5 nM and about 50 nM, or between about 1.0 nM and about 20 nM, or between about 2.0 nM and about 10 nM, as determined in an in vitro antigen-binding assay. In some embodiments, the AF2 specifically binds human or cyno CD3 with a dissociation constant (K_{d}) constant between about 10 nM and about 400 nM, or between about 50 nM and about 350 nM, or between about 100 nM and 300 nM, as determined in an in vitro antigen-binding assay. In certain embodiments, the AF2 specifically binds human or cyno CD3 with a dissociation constant (K_{d}) weaker than about 3 nM, or about 10 nM, or about 50 nM, or about 100 nM, or about 150 nM, or about 200 nM, or about 250 nM, or about 300 nM, or about 400 nM, as determined in an in vitro antigen-binding assay. In yet another embodiment, the AF2 specifically binds human or cyno CD3 with at least 2-fold, 3-fold, 4-fold, 5-fold, 6-fold, 7-fold, 8-fold, 9-fold, or at least 10-fold weaker binding affinity than an antibody-binding fragment consisting of an amino acid sequence of SEQ ID NO: 781, as determined by the respective dissociation constants (K_{d}) in an in vitro antigen-binding assays. In some embodiments, the AF2 exhibits a binding affinity to CD3 that is at least 2-fold, 3-fold, 4-fold, 5-fold, 6-fold, 7-fold, 8-fold, 9-fold, 10-fold, 20-fold, 50-fold, 100-fold, or at least 1000-fold at weaker relative to that of the AF1, as determined by the respective dissociation constants (K_{d}) in an in vitro antigen-binding assay.

[0044] In another aspect, the present disclosure provides a pharmaceutical composition comprising the polypeptide disclosed herein and one or more pharmaceutically suitable excipients. In some embodiment, the pharmaceutical composition is formulated for intradermal, subcutaneous, intravenous, intra-arterial, intraabdominal, intraperitoneal, intrathecal, or intramuscular administration. In another embodiment, the pharmaceutical composition is in a liquid form or a frozen form. In certain embodiment, the pharmaceutical composition is in a prefilled syringe for a single injection. In another embodiment, the pharmaceutical composition is formulated as a lyophilized powder to be reconstituted prior to administration.

[0045] In yet another aspect, the present disclosure provides a polypeptide disclosed herein for use in the preparation of a medicament for treating a disease in a subject in need thereof. In some embodiments, the disease is selected from the group of cancers consisting of anaplastic and medullary thyroid cancers, appendiceal cancer, arrhenoblastoma, biliary tract carcinoma, bladder cancer, breast cancer, cancers of the bile duct, carcinoid tumor, cervical cancer, cholangiocarcinoma, colon cancer, colorectal cancer, craniopharyngioma, endometrial cancer, epithelial intraperitoneal malignancy with malignant ascites, esophageal cancer, Ewing sarcoma, fallopian tube cancer, follicular cancer, gall bladder cancer, gastric cancer, gastrointestinal stromal tumor (GIST), GE-junction cancer, genito-urinary tract cancer, glioma, glioblastoma, head and neck cancer, hepatoblastoma, hepatocarcinoma, HR+ and HER2+ breast cancer, Hurthle cell cancer, Inflammatory breast cancer, Kaposi sarcoma, kidney cancer, laryngeal cancer, liposarcoma, liver cancer, lung cancer, medulloblastoma, melanoma, Merkel cell carcinoma, neuroblastoma, neuroblastoma, neuroendocrine cancer, non-small cell lung cancer, osteosarcoma (bone cancer), ovarian cancer, ovarian cancer with malignant ascites, pancreatic cancer, pancreatic neuroendocrine tumor, papillary cancer, parathyroid cancer, peritoneal carcinomatosis, peritoneal mesothelioma, primitive neuroectodermal tumor, prostate cancer, retinoblastoma, rhabdomyosarcoma, salivary gland carcinoma, sarcoma, skin cancer, small cell lung cancer, small intestine cancer, stomach cancer, testicular cancer, thyroid cancer, triple negative breast cancer, urothelial cancer, uterine cancer, uterine serous carcinoma, vaginal cancer, vulvar cancer, and Wilms tumor.

[0046] In a related aspect, the present disclosure provides a method of treating a disease in a subject, comprising administering to the subject in need thereof one or more therapeutically effective doses of the pharmaceutical composition disclosed herein. In some embodiments, the subject is selected from the group consisting of mouse, rat, monkey, and human.

[0047] In certain embodiments, the disease is selected from the group of cancers consisting of anaplastic and medullary thyroid cancers, appendiceal cancer, arrhenoblastoma, biliary tract carcinoma, bladder cancer, breast cancer, cancers of the bile duct, carcinoid tumor, cervical cancer, cholangiocarcinoma, colon cancer, colorectal cancer, craniopharyngioma, endometrial cancer, epithelial intraperitoneal malignancy with malignant ascites, esophageal cancer, Ewing sarcoma, fallopian tube cancer, follicular cancer, gall bladder cancer, gastric cancer, gastrointestinal stromal tumor (GIST), GE-junction cancer, genito-urinary tract cancer, glioma, glioblastoma, head and neck cancer, hepatoblastoma, hepatocarcinoma, HR+ and HER2+ breast cancer, Hurthle cell cancer, Inflammatory breast cancer, Kaposi sarcoma, kidney cancer, laryngeal cancer, liposarcoma, liver cancer, lung cancer, medulloblastoma, melanoma, Merkel cell carcinoma, neuroblastoma, neuroblastoma, neuroendocrine cancer, non-small cell lung cancer, osteosarcoma (bone cancer), ovarian cancer, ovarian cancer with malignant ascites, pancreatic cancer, pancreatic neuroendocrine tumor, papillary cancer, parathyroid cancer, peritoneal carcinomatosis, peritoneal mesothelioma, primitive neuroectodermal tumor, prostate cancer, retinoblastoma, rhabdomyosarcoma, salivary gland carcinoma, sarcoma, skin cancer, small cell lung cancer, small intestine cancer, stomach cancer, testicular cancer, thyroid cancer, triple negative breast cancer, urothelial cancer, uterine cancer, uterine serous carcinoma, vaginal cancer, vulvar cancer, and Wilms tumor. In other embodiments, the pharmaceutical composition is administered to the subject as one or more therapeutically effective doses administered twice weekly, once a week, every two weeks, every three weeks, every four weeks, or monthly. In certain embodiments, the pharmaceutical composition is administered to the subject as one or more therapeutically effective doses over a period of at least two weeks, or at least one month, or at least two months, or at least three months, or at least four months, or at least five months, or at least six months. In some embodiments, the dose is administered intradermally, subcutaneously, intravenously, intra-arterially, intra-abdominally, intraperitoneally, intrathecally, or intramuscularly.

[0048] In a certain aspect, the present disclosure provides an isolated nucleic acid, the nucleic acid comprising (a) a polynucleotide encoding a polypeptide disclosed herein; or (b) the complement of the polynucleotide of (a).

[0049] In a related aspect, the present disclosure provides an expression vector comprising the polynucleotide sequence disclosed herein and a recombinant regulatory sequence operably linked to the polynucleotide sequence.

[0050] In yet another aspect, the present disclosure provides an isolated host cell, comprising the expression vector disclosed herein. In some embodiments, the host cell is a prokaryote. In certain embodiments, the host cell is E. coli or a mammalian cell.

### INCORPORATION BY REFERENCE

[0051] All publications, patents, and patent applications mentioned in this specification are herein incorporated by reference to the same extent as if each individual publication, patent, or patent application was specifically and individually indicated to be incorporated by reference.

### BRIEF DESCRIPTION OF THE DRAWINGS

[0052] Various features of this disclosure are set forth with particularity in the appended claims. A better understanding of the features and advantages of the present disclosure will be obtained by reference to the following detailed description that sets forth illustrative embodiments, in which the principles of the invention are utilized, and the accompanying drawings of which:

[0053] FIG. 1 depicts the individual components of a bispecific antigen binding fragment composition. FIG. 1A depicts an antigen binding fragment having affinity to a target cell marker. FIG. 1B depicts an antigen binding fragment having affinity to an effector cell. FIGS. 1C and 1D depict XTEN polypeptides of different length. FIG. 1E depicts a cleavable release segment.

[0054] FIG. 2 depicts 2 different forms of the polypeptide compositions described herein. FIG. 2A depicts, on the left side, an antigen binding fragment to an effector cell fused with a release segment and an XTEN, while the arrow depicts the action of a protease to cleave the release segment leading to, on the right hand side, the release of the XTEN from the antigen binding fragment of the polypeptide, such that the antigen-binding fragment regains binding affinity potential (e.g., its full binding affinity potential) as it is no longer shielded by the XTEN. FIG. 2B depicts, on the left side, a bispecific composition having an antigen binding fragment to an effector cell fused to an antigen binding fragment having binding affinity to a target cell marker. A release segment and an XTEN are also fused to the antigen binding fragment having affinity to the effector cell, while the arrow depicts the action of a protease to cleave the release segment leading to, on the right hand side, the release of the XTEN and the fused antigen binding fragments from the polypeptide, which would then regain their full binding affinity potential as they are no longer shielded by the XTEN.

[0055] FIG. 3 depicts two different forms of a bispecific antigen binding polypeptide. On the left side, a bispecific composition having an antigen binding fragment to an effector cell is fused to an antigen binding fragment having binding affinity to a target cell marker with the release segment (with the scissors indicating susceptibility to protease cleavage) and the XTEN is fused to the antigen binding fragment having binding affinity to an effector cell, while on the right hand side, a bispecific composition having an antigen binding fragment to an effector cell is fused to an antigen binding fragment having binding affinity to a target cell marker, with the release segment and the XTEN fused to the antigen binding fragment having binding affinity to the target cell marker.

[0056] FIG. 4 depicts three different forms of a bispecific antigen-binding polypeptide. FIG. 4A depicts a bispecific composition having an scFv antigen binding fragment to an effector cell fused to an scFv antigen binding fragment having binding affinity to a target cell marker with a release segment (with the scissors indicating susceptibility to protease cleavage) and an XTEN fused to each antigen binding fragment. FIGS. 4B and 4C are variations of 4A in which the antigen binding fragments are in a diabody configuration, with the release segments (with the scissors indicating susceptibility to protease cleavage) and XTENs fused to the antigen binding fragment to an effector cell or the target cell marker, respectively.

[0057] FIG. 5 shows schematic representations of a bispecific antigen binding polypeptide in proximity to tumor tissue (on the top) and normal tissue (on the bottom). The bispecific antigen binding polypeptide is preferentially cleaved at the tumor tissue to release one or more XTEN moieties as compared to that in the normal tissue. The cleaved bispecific antigen binding polypeptide is capable of binding to a T cell and a tumor cell expressing a tumor-specific marker.

[0058] FIG. 6 depicts the amino acid sequence of the control release segment RSR-1517 (SEQ ID NO: 53), showing the sites of peptide cleavage for the listed proteases.

LENGTHY TABLES
The patent contains a lengthy table section. A copy of the table is available in electronic form from the USPTO web site ( https://seqdata.uspto.gov/?pageRequest=docDetail&DocID=US20230312729A1 ). An electronic copy of the table will also be available from the USPTO upon request and payment of the fee set forth in 37 CFR 1.19(b)(3).

### DETAILED DESCRIPTION OF THE INVENTION

[0059] While preferred embodiments of the present invention have been shown and described herein, it will be obvious to those skilled in the art that such embodiments are provided by way of example only. Numerous variations, changes, and substitutions will now occur to those skilled in the art without departing from the invention. It should be understood that various alternatives to the embodiments of the invention described herein may be employed in practicing the invention. It is intended that the following claims define the scope of the invention and that methods and structures within the scope of these claims and their equivalents be covered thereby.

[0060] Unless otherwise defined, all technical and scientific terms used herein have the same meaning as commonly understood by one of ordinary skill in the art to which this invention belongs. Although methods and materials similar or equivalent to those described herein can be used in the practice or testing of the present invention, suitable methods and materials are described below. In case of conflict, the patent specification, including definitions, will control. In addition, the materials, methods, and examples are illustrative only and not intended to be limiting. Numerous variations, changes, and substitutions will now occur to those skilled in the art without departing from the invention.

### Definitions

[0061] In the context of the present application, the following terms have the meanings ascribed to them unless specified otherwise:

[0062] As used throughout the specification and claims, the terms “a,” “an,” and “the” are used in the sense that they mean “at least one,” “at least a first,” “one or more,” or “a plurality” of the referenced components or steps, except in instances wherein an upper limit is thereafter specifically stated. Therefore, a “release segment,” as used herein, means “at least a first release segment,” but includes a plurality of release segments. The operable limits and parameters of combinations, as with the amounts of any single agent, will be known to those of ordinary skill in the art in light of the present disclosure.

[0063] The terms “polypeptide”, “peptide”, and “protein” are used interchangeably herein to refer to polymers of amino acids of any length. The polymer may be linear or branched, it may comprise modified amino acids, and it may be interrupted by non-amino acids. The terms also encompass an amino acid polymer that has been modified, for example, by disulfide bond formation, glycosylation, lipidation, acetylation, phosphorylation, or any other manipulation, such as conjugation with a labeling component.

[0064] The term “monomeric” as applied to a polypeptide refers to the state of the polypeptide as being a single continuous amino acid sequence substantially unassociated with one or more additional polypeptides of the same or different sequence.

[0065] As used herein, the term “amino acid” refers to either natural and/or unnatural or synthetic amino acids, including but not limited to both the D or L optical isomers, and amino acid analogs and peptidomimetics. Standard single or three letter codes may be used to designate amino acids.

[0066] The term “natural L-amino acid” or “L-amino acid” means the L optical isomer forms of glycine (G), proline (P), alanine (A), valine (V), leucine (L), isoleucine (I), methionine (M), cysteine (C), phenylalanine (F), tyrosine (Y), tryptophan (W), histidine (H), lysine (K), arginine (R), glutamine (Q), asparagine (N), glutamic acid (E), aspartic acid (D), serine (S), and threonine (T).

[0067] The term “antibody” is used herein in the broadest sense and encompasses various antibody structures, including but not limited to monoclonal antibodies, polyclonal antibodies, multispecific antibodies (e.g., bispecific antibodies), nanobodies, VHH antibodies, and antibody fragments so long as they exhibit the desired antigen-binding activity or immunological activity. The term “immunoglobulin” (Ig) is used interchangeably with antibody herein. The full-length antibodies may be, for example, monoclonal, recombinant, chimeric, deimmunized, humanized and human antibodies. Antibodies represent a large family of molecules that include several types of molecules, such as IgD, IgG, IgA, IgM and IgE. The term “immunoglobulin molecule” includes, for example, hybrid antibodies, or altered antibodies, and fragments thereof. It has been shown that the antigen binding function of an antibody can be performed by fragments of a naturally-occurring or a monoclonal antibody.

[0068] A “humanized” antibody refers to a chimeric antibody comprising amino acid residues from non-human complementarity-determining regions (CDRs) and amino acid residues from human framework regions (FRs). In certain embodiments, a humanized antibody will comprise substantially all of at least one, and typically two, variable domains, in which all or substantially all of the CDRs correspond to those of a non-human antibody (which may include amino acid substitutions), and all or substantially all of the FRs correspond to those of a human antibody (which may include amino acid substitutions).

[0069] The term “monoclonal antibody” as used herein refers to an antibody obtained from a population of substantially homogeneous antibodies, i.e., the individual antibodies comprising the population are identical and/or bind the same epitope, except for possible variant antibodies, e.g., containing naturally occurring mutations or arising during production of a monoclonal antibody preparation, such variants generally being present in minor amounts. In contrast to polyclonal antibody preparations, which typically include different antibodies directed against different determinants (epitopes), each monoclonal antibody of a monoclonal antibody preparation is directed against a single determinant on an antigen. Thus, the modifier “monoclonal” indicates the character of the antibody as being obtained from a substantially homogeneous population of antibodies, and is not to be construed as requiring production of the antibody by any particular method. For example, the monoclonal antibodies to be used in accordance with the present invention may be made by a variety of techniques, including but not limited to the hybridoma method, recombinant DNA methods, phage-display methods, and methods utilizing transgenic animals containing all or part of the human immunoglobulin loci, such methods and other exemplary methods for making monoclonal antibodies being known in the art or described herein.

[0070] An “antigen-binding fragment” as used herein refers to an immunoglobulin molecule and immunologically active portions of an immunoglobulin molecule, i.e., a molecule that contains an antigen-binding site which specifically binds (“immunoreacts with”) an antigen. Examples include but are not limited to Fv, Fab, Fab′, Fab′-SH, F(ab′)2, diabodies, linear antibodies (see U.S. Pat. No. 5,641,870), a single domain antibody, a single domain camelid antibody, single-chain fragment variable (scFv) antibody molecules, and multispecific antibodies formed from antibody fragments that retain the ability to specifically bind to antigen. Also encompassed within the term “antigen binding fragment” is any polypeptide chain-containing molecular structure that has a specific shape which fits to and recognizes and binds to an epitope, where one or more non-covalent binding interactions stabilize the complex between the molecular structure and the epitope. An antigen binding fragment “specifically binds to” or is “immunoreactive with” an antigen if it binds with greater affinity or avidity than it binds to other reference antigens including polypeptides or other substances.

[0071] “scFv” or “single chain fragment variable” are used interchangeably herein to refer to an antibody fragment format comprising variable regions of heavy (“VH”) and light (“VL”) chains or two copies of a VH or VL chain of an antibody, which are joined together by a short flexible peptide linker which enables the scFv to form the desired structure for antigen binding. The scFv is a fusion protein of the variable regions of the heavy (VH) and light chains (VL) of immunoglobulins, and can be easily expressed in functional form in E. coli or other host cells.

[0072] “Diabodies” refers to small antibody fragments prepared by constructing scFv fragments with short linkers (about 5-10 residues) between the VH and VL domains such that inter-chain but not intra-chain pairing of the V domains is achieved, resulting in a bivalent fragment, i.e., fragment having two antigen-binding sites. Bispecific diabodies are heterodimers of two “crossover” scFv fragments in which the VH and VL domains of the two antibodies are present on different polypeptide chains. Diabodies are described more fully in, for example, US7635475.

[0073] The term “bispecific antigen-binding fragment” is to be understood as an antigen binding fragment that has binding specificities for at least two different antigens.

[0074] The terms “antigen”, “target antigen” and “immunogen” are used interchangeably herein to refer to the structure or binding determinant that an antibody, antibody fragment or an antibody fragment-based molecule binds to or has specificity against. The target antigen may be polypeptide, carbohydrate, nucleic acid, lipid, hapten or other naturally occurring or synthetic compound or portions thereof. An antigen is also a ligand for those antibodies or antibody fragments that have binding affinity for the antigen. Non-limiting exemplary antigens described herein included CD3 and EGFR (and portions thereof) from human, non-human primates, murine, and other homologues thereof.

[0075] The term “CD3 antigen binding fragment” refers to an antigen binding fragment that is capable of binding cluster of differentiation 3 (CD3) or a member of the CD3 complex with sufficient affinity such that the antigen binding fragment is useful as a diagnostic and/or therapeutic agent in targeting CD3.

[0076] An “EGFR antigen binding fragment” refers to an antigen binding fragment that is capable of binding epidermal growth factor receptor. EGFR is a member of the ErbB family of receptors, a subfamily of four closely related receptor tyrosine kinases: EGFR (ErbB-1), HER2/neu (ErbB-2), Her 3 (ErbB-3) and Her 4 (ErbB-4).

[0077] A “target tissue” or “target cell” refers to a tissue or cell bearing the EGFR antigen that is the cause of or is part of a disease condition such as, but not limited to cancer or related conditions. Sources of diseased target tissue or cells include a body organ, a tumor, a cancerous cell or population of cancerous cells or cells that form a matrix or are found in association with a population of cancerous cells, bone, skin, cells that produce cytokines or factors contributing to a disease condition.

[0078] The term “epitope” refers to the particular site on an antigen molecule to which an antibody, antibody fragment, or binding domain binds. An epitope is a ligand of an antibody or antibody fragment.

[0079] “Affinity” refers to the strength of the sum total of noncovalent interactions between a single binding site of a molecule (e.g., an antibody) and its binding partner (e.g., an antigen). Unless indicated otherwise, as used herein, “binding affinity” refers to intrinsic binding affinity which reflects a 1: 1 interaction between members of a binding pair (e.g., antibody and antigen). The affinity of a molecule X for its partner Y can generally be represented by the dissociation constant (K_{d}). As used herein “a greater binding affinity” means a lower K_{d} value; e.g., 1 × 10⁻⁹ M is a greater binding affinity than 1 × 10⁻⁸ M. An antibody which binds an antigen of interest, e.g., a tumor-associated EGFR antigen, is one that binds the antigen with sufficient affinity such that the antibody is useful as a diagnostic and/or therapeutic agent in targeting a cell or tissue expressing the antigen, and does not significantly cross-react with other proteins.

[0080] “Dissociation constant”, or “K_{d}”, are used interchangeably and refer to the affinity between a ligand “L” and a protein “P”; i.e. how tightly a ligand binds to a particular protein. It can be calculated using the formula K_{d} = [L][P]/[LP], where [P], [L] and [LP] represent molar concentrations of the protein, ligand and complex, respectively.

[0081] The term “hypervariable region,” “HVR,” or “CDR”, when used herein, interchangeably refer to the regions of an antibody variable domain which are hypervariable in sequence and/or form structurally defined loops and/or are involved in antigen recognition. Generally, antibodies comprise six hypervariable regions; three in the VH (H1, H2, H3), and three in the VL (L1, L2, L3). A number of CDR delineations are in use and are encompassed herein; e.g., CDR-L1 refers to the first hypervariable CDR region of the light chain, CDR-H2 refers to the second hypervariable CDR region of the heavy chain, etc. The Kabat Complementarity Determining Regions (CDRs) are based on sequence variability and are the most commonly used (Kabat et al., Sequences of Proteins of Immunological Interest, 5th Ed. Public Health Service, National Institutes of Health, Bethesda, Md. (1991)).

[0082] “Isoelectric point” or “pI” are used interchangeably herein to refer to the pH at which a particular molecule carries no net electrical charge or is electrically neutral in the statistical mean. The standard nomenclature to represent the isoelectric point is pH, such that the units are pH units; e.g., an antigen binding fragment with a pI of 6.3 would have a neutral charge in solution at pH 6.3. The isoelectric point can be determined mathematically, including a number of algorithms for estimating isoelectric points of peptides and proteins; e.g., the Henderson-Hasselbalch equation with different pK values. The isoelectric point can also be determined experimentally by in vitro assays such as capillary electrophoresis focusing.

[0083] “Framework” or “FR” residues are those variable domain residues in antigen binding fragments other than the hypervariable region residues as herein defined, and are generally located between or that flank CDR. A number of FR delineations are in use and are encompassed herein; e.g., FR-L1 refers to the first FR region of the light chain, FR-H2 refers to the second FR region of the heavy chain, etc.

[0084] The term “release segment” or “RS” refers to a cleavage sequence in the subject compositions that can be recognized and cleaved by one or more proteases, effecting release of the antigen binding fragments and XTEN from the composition. As used herein, “mammalian protease” means a protease that normally exists in the body fluids, cells, tissues, and may be found in higher levels in certain target tissues or cells, e.g., in diseased tissues (e.g., tumor) of a mammal. RS sequences can be engineered to be cleaved by various mammalian proteases or multiple mammalian proteases that are present in or proximal to target tissues in a subject or are introduced in an in vitro assay. Other equivalent proteases (endogenous or exogenous) that are capable of recognizing a defined cleavage site can be utilized. It is specifically contemplated that the RS sequence can be adjusted and tailored to the protease utilized and can incorporate linker amino acids to join to adjacent polypeptides

[0085] The term “cleavage site” refers to that location between adjacent amino acids in a peptide or polypeptide that can be broken or cleaved by enzymes such as proteases; the breaking of the peptide bonds between the adjacent amino acids.

[0086] The term “within”, when referring to a first polypeptide being linked to a second polypeptide, encompasses linking or fusion of an additional component that connects the N-terminus of the first or second polypeptide to the C-terminus of the second or first polypeptide, respectively, as well as insertion of the first polypeptide into the sequence of the second polypeptide. For example, when an RS component is linked “within” a chimeric polypeptide assembly, the RS may be linked to the N-terminus, the C-terminus, or may be inserted between any two amino acids of an XTEN polypeptide.

[0087] “Activity” as applied to form(s) of a composition provided herein, refers to an action or effect, including but not limited to antigen binding, antagonist activity, agonist activity, a cellular or physiologic response, cell lysis, cell death, or an effect generally known in the art for the effector component of the composition, whether measured by an in vitro, ex vivo or in vivo assay or a clinical effect.

[0088] “Effector cell”, as used herein, includes any eukaryotic cells capable of conferring an effect on a target cell. For example, an effector cell can induce loss of membrane integrity, pyknosis, karyorrhexis, apoptosis, lysis, and/or death of a target cell. In another example, an effector cell can induce division, growth, differentiation of a target cell or otherwise altering signal transduction of a target cell. Non-limiting examples of effector cells include plasma cell, T cell, CD4 cell, CD8 cell, B cell, cytokine induced killer cell (CIK cell), master cell, dendritic cell, regulatory T cell (RegT cell), helper T cell, myeloid cell, macrophage, and NK cell.

[0089] An “effector cell antigen” refers to molecules expressed by an effector cell, including without limitation cell surface molecules such as proteins, glycoproteins or lipoproteins. Exemplary effector cell antigens include proteins of the CD3 complex or the T cell receptor (TCR), CD4, CD8, CD25, CD38, CD69, CD45RO, CD57, CD95, CD107, and CD154, as well as effector molecules such as cytokines in association with, bound to, expressed within, or expressed and released by, an effector cell. An effector cell antigen can serve as the binding counterpart of a binding domain of the subject chimeric polypeptide assembly.

[0090] As used herein, “CD3” or “cluster of differentiation 3” means the T cell surface antigen CD3 complex, which includes in individual form or independently combined form all known CD3 subunits, for example CD3 epsilon, CD3 delta, CD3 gamma, CD3 zeta, CD3 alpha and CD3 beta. The extracellular domains of CD3 epsilon, gamma and delta contain an immunoglobulin-like domain, so are therefore considered part of the immunoglobulin superfamily. CD3 includes, for example, human CD3 epsilon protein (NCBI RefSeq No. NP_000724), which is 207 amino acids in length, and human CD3 gamma protein (NCBI RefSeq No. NP_000064), which is 182 amino acids in length.

[0091] As used herein, the term “ELISA” refers to an enzyme-linked immunosorbent assay as described herein or as otherwise known in the art.

[0092] A “host cell” includes an individual cell or cell culture which can be or has been a recipient for the subject vectors into which exogenous nucleic acid has been introduced, such as those described herein. Host cells include progeny of a single host cell. The progeny may not necessarily be completely identical (in morphology or in genomic of total DNA complement) to the original parent cell due to natural, accidental, or deliberate mutation. A host cell includes cells transfected in vivo with a vector of this invention.

[0093] “Isolated,” when used to describe the various polypeptides disclosed herein, means a polypeptide that has been identified and separated and/or recovered from a component of its natural environment or from a more complex mixture (such as during protein purification). Contaminant components of its natural environment are materials that would typically interfere with diagnostic or therapeutic uses for the polypeptide, and may include enzymes, hormones, and other proteinaceous or non-proteinaceous solutes. As is apparent to those of skill in the art, a non-naturally occurring polynucleotide, peptide, polypeptide, protein, antibody, or fragments thereof, does not require “isolation” to distinguish it from its naturally occurring counterpart. In addition, a “concentrated”, “separated” or “diluted” polynucleotide, peptide, polypeptide, protein, antibody, or fragments thereof, is distinguishable from its naturally occurring counterpart in that the concentration or number of molecules per volume is generally greater than that of its naturally occurring counterpart. In general, a polypeptide made by recombinant means and expressed in a host cell is considered to be “isolated.”

[0094] An “isolated nucleic acid” is a nucleic acid molecule that is identified and separated from at least one contaminant nucleic acid molecule with which it is ordinarily associated in the natural source of the polypeptide-encoding nucleic acid. For example, an isolated polypeptide-encoding nucleic acid molecule is other than in the form or setting in which it is found in nature. Isolated polypeptide-encoding nucleic acid molecules therefore are distinguished from the specific polypeptide-encoding nucleic acid molecule as it exists in natural cells. However, an isolated polypeptide-encoding nucleic acid molecule includes polypeptide-encoding nucleic acid molecules contained in cells that ordinarily express the polypeptide where, for example, the nucleic acid molecule is in a chromosomal or extra-chromosomal location different from that of natural cells.

[0095] A “chimeric” protein or polypeptide contains at least one fusion polypeptide comprising at least one region in a different position in the sequence than that which occurs in nature. The regions may normally exist in separate proteins and are brought together in the fusion polypeptide; or they may normally exist in the same protein but are placed in a new arrangement in the fusion polypeptide. A chimeric protein may be created, for example, by chemical synthesis, or by creating and translating a polynucleotide in which the peptide regions are encoded in the desired relationship.

[0096] “Fused,” and “fusion” are used interchangeably herein, and refers to the joining together of two or more peptide or polypeptide sequences by recombinant means. A “fusion protein” or “chimeric protein” comprises a first amino acid sequence linked to a second amino acid sequence with which it is not naturally linked in nature.

[0097] “XTENylated” is used to denote a peptide or polypeptide that has been modified by the linking or fusion of one or more XTEN polypeptides (described, below) to the peptide or polypeptide, whether by recombinant or chemical cross-linking means.

[0098] “Operably linked” means that the DNA sequences being linked are in reading phase or in-frame. An “in-frame fusion” refers to the joining of two or more open reading frames (ORFs) to form a continuous longer ORF, in a manner that maintains the correct reading frame of the original ORFs. For example, a promoter or enhancer is operably linked to a coding sequence for a polypeptide if it affects the transcription of the polypeptide sequence. Thus, the resulting recombinant fusion protein is a single protein containing two or more segments that correspond to polypeptides encoded by the original ORFs (which segments are not normally so joined in nature).

[0099] In the context of polypeptides, a “linear sequence” or a “sequence” is an order of amino acids in a polypeptide in an amino to carboxyl terminus (N- to C-terminus) direction in which residues that neighbor each other in the sequence are contiguous in the primary structure of the polypeptide. A “partial sequence” is a linear sequence of part of a polypeptide that is known to comprise additional residues in one or both directions.

[0100] “Heterologous” means derived from a genotypically distinct entity from the rest of the entity to which it is being compared. For example, a glycine-rich sequence removed from its native coding sequence and operatively linked to a coding sequence other than the native sequence is a heterologous glycine-rich sequence. The term “heterologous” as applied to a polynucleotide, a polypeptide, means that the polynucleotide or polypeptide is derived from a genotypically distinct entity from that of the rest of the entity to which it is being compared.

[0101] The terms “polynucleotides”, “nucleic acids”, “nucleotides,” and “oligonucleotides” are used interchangeably. They refer to nucleotides of any length, encompassing a singular nucleic acid as well as plural nucleic acids, either deoxyribonucleotides or ribonucleotides, or analogs thereof. Polynucleotides may have any three-dimensional structure, and may perform any function, known or unknown. The following are non-limiting examples of polynucleotides: coding or non-coding regions of a gene or gene fragment, loci (locus) defined from linkage analysis, exons, introns, messenger RNA (mRNA), transfer RNA, ribosomal RNA, ribozymes, cDNA, recombinant polynucleotides, branched polynucleotides, plasmids, vectors, isolated DNA of any sequence, isolated RNA of any sequence, nucleic acid probes, and primers. A polynucleotide may comprise modified nucleotides, such as methylated nucleotides and nucleotide analogs. If present, modifications to the nucleotide structure may be imparted before or after assembly of the polymer. The sequence of nucleotides may be interrupted by non-nucleotide components. A polynucleotide may be further modified after polymerization, such as by conjugation with a labeling component.

[0102] The term “complement of a polynucleotide” denotes a polynucleotide molecule having a complementary base sequence and reverse orientation as compared to a reference sequence, such that it could hybridize with a reference sequence with complete fidelity.

[0103] “Recombinant” as applied to a polynucleotide means that the polynucleotide is the product of various combinations of recombination steps which may include cloning, restriction and/or ligation steps, and other procedures that result in expression of a recombinant protein in a host cell.

[0104] The terms “gene” and “gene fragment” are used interchangeably herein. They refer to a polynucleotide containing at least one open reading frame that is capable of encoding a particular protein after being transcribed and translated. A gene or gene fragment may be genomic or cDNA, as long as the polynucleotide contains at least one open reading frame, which may cover the entire coding region or a segment thereof. A “fusion gene” is a gene composed of at least two heterologous polynucleotides that are linked together.

[0105] As used herein, a “coding region” or “coding sequence” is a portion of polynucleotide which consists of codons translatable into amino acids. Although a “stop codon” (TAG, TGA, or TAA) is typically not translated into an amino acid, it may be considered to be part of a coding region, but any flanking sequences, for example promoters, ribosome binding sites, transcriptional terminators, introns, and the like, are not part of a coding region. The boundaries of a coding region are typically determined by a start codon at the 5′ terminus, encoding the amino terminus of the resultant polypeptide, and a translation stop codon at the 3′ terminus, encoding the carboxyl terminus of the resulting polypeptide. Two or more coding regions of the present invention can be present in a single polynucleotide construct, e.g., on a single vector, or in separate polynucleotide constructs, e.g., on separate (different) vectors. It follows, then, that a single vector can contain just a single coding region, or comprise two or more coding regions, e.g., a single vector can separately encode a binding domain-A and a binding domain-B as described below. In addition, a vector, polynucleotide, or nucleic acid of the invention can encode heterologous coding regions, either fused or unfused to a nucleic acid encoding a binding domain of the invention. Heterologous coding regions include without limitation specialized elements or motifs, such as a secretory signal peptide or a heterologous functional domain.

[0106] The term “downstream” refers to a nucleotide sequence that is located 3′ to a reference nucleotide sequence. In certain embodiments, downstream nucleotide sequences relate to sequences that follow the starting point of transcription. For example, the translation initiation codon of a gene is located downstream of the start site of transcription.

[0107] The term “upstream” refers to a nucleotide sequence that is located 5′ to a reference nucleotide sequence. In certain embodiments, upstream nucleotide sequences relate to sequences that are located on the 5′ side of a coding region or starting point of transcription. For example, most promoters are located upstream of the start site of transcription.

[0108] “Homology” or “homologous” refers to sequence similarity or interchangeability between two or more polynucleotide sequences or between two or more polypeptide sequences. When using a program such as BestFit to determine sequence identity, similarity or homology between two different amino acid sequences, the default settings may be used, or an appropriate scoring matrix, such as blosum45 or blosum80, may be selected to optimize identity, similarity or homology scores. Preferably, polynucleotides that are homologous are those which hybridize under stringent conditions as defined herein and have at least 70%, preferably at least 80%, more preferably at least 90%, more preferably 95%, more preferably 97%, more preferably 98%, and even more preferably 99% sequence identity compared to those sequences. Polypeptides that are homologous preferably have sequence identities that are at least 70%, preferably at least 80%, even more preferably at least 90%, even more preferably at least 95-99% identical when optimally aligned over sequences of comparable length.

[0109] “Ligation” as applied to polynucleic acids refers to the process of forming phosphodiester bonds between two nucleic acid fragments or genes, linking them together. To ligate the DNA fragments or genes together, the ends of the DNA must be compatible with each other. In some cases, the ends will be directly compatible after endonuclease digestion. However, it may be necessary to first convert the staggered ends commonly produced after endonuclease digestion to blunt ends to make them compatible for ligation.

[0110] The terms “stringent conditions” or “stringent hybridization conditions” include reference to conditions under which a polynucleotide will hybridize to its target sequence, to a detectably greater degree than other sequences (e.g., at least 2-fold over background). Generally, stringency of hybridization is expressed, in part, with reference to the temperature and salt concentration under which the wash step is carried out. Typically, stringent conditions will be those in which the salt concentration is less than about 1.5 M Na ion, typically about 0.01 to 1.0 M Na ion concentration (or other salts) at pH 7.0 to 8.3 and the temperature is at least about 30° C. for short polynucleotides (e.g., 10 to 50 nucleotides) and at least about 60° C. for long polynucleotides (e.g., greater than 50 nucleotides)-for example, “stringent conditions” can include hybridization in 50% formamide, 1 M NaCl, 1% SDS at 37° C., and three washes for 15 min each in 0.1 xSSC/1% SDS at 60° C. to 65° C. Alternatively, temperatures of about 65° C., 60° C., 55° C., or 42° C. may be used. SSC concentration may be varied from about 0.1 to 2x SSC, with SDS being present at about 0.1%. Such wash temperatures are typically selected to be about 5° C. to 20° C. lower than the thermal melting point for the specific sequence at a defined ionic strength and pH. The Tm is the temperature (under defined ionic strength and pH) at which 50% of the target sequence hybridizes to a perfectly matched probe. An equation for calculating Tm and conditions for nucleic acid hybridization are well known and can be found in Sambrook, J. et al., “Molecular Cloning: A Laboratory Manual,” 3^{rd} edition, Cold Spring Harbor Laboratory Press, 2001. Typically, blocking reagents are used to block non-specific hybridization. Such blocking reagents include, for instance, sheared and denatured salmon sperm DNA at about 100-200 µg/ml. Organic solvent, such as formamide at a concentration of about 35-50% v/v, may also be used under particular circumstances, such as for RNA:DNA hybridizations. Useful variations on these wash conditions will be readily apparent to those of ordinary skill in the art.

[0111] The terms “percent identity,” percentage of sequence identity,” and “% identity,” as applied to polynucleotide sequences, refer to the percentage of residue matches between at least two polynucleotide sequences aligned using a standardized algorithm. Such an algorithm may insert, in a standardized and reproducible way, gaps in the sequences being compared in order to optimize alignment between two sequences, and therefore achieve a more meaningful comparison of the two sequences. Percent identity may be measured over the length of an entire defined polynucleotide sequence, or may be measured over a shorter length, for example, over the length of a fragment taken from a larger, defined polynucleotide sequence, for instance, a fragment of at least 45, at least 60, at least 90, at least 120, at least 150, at least 210 or at least 450 contiguous residues. Such lengths are exemplary only, and it is understood that any fragment length supported by the sequences shown herein, in the tables, figures or Sequence Listing, may be used to describe a length over which percentage identity may be measured. The percentage of sequence identity is calculated by comparing two optimally aligned sequences over the window of comparison, determining the number of matched positions (at which identical residues occur in both polypeptide sequences), dividing the number of matched positions by the total number of positions in the window of comparison (i.e., the window size), and multiplying the result by 100 to yield the percentage of sequence identity. When sequences of different length are to be compared, the shortest sequence defines the length of the window of comparison. Conservative substitutions are not considered when calculating sequence identity.

[0112] The terms “percent identity,” percentage of sequence identity,” and “% identity,” with respect to the polypeptide sequences identified herein, is defined as the percentage of amino acid residues in a query sequence that are identical with the amino acid residues of a second, reference polypeptide sequence of comparable length or a portion thereof, after aligning the sequences and introducing gaps, if necessary, to achieve the maximum percent sequence identity, and not considering any conservative substitutions as part of the sequence identity, thereby resulting in optimal alignment. Alignment for purposes of determining percent amino acid sequence identity can be achieved in various ways that are within the skill in the art, for instance, using publicly available computer software such as BLAST, BLAST-2, ALIGN or Megalign (DNASTAR) software. Those skilled in the art can determine appropriate parameters for measuring alignment, including any algorithms needed to achieve optimal alignment over the full length of the sequences being compared. Percent identity may be measured over the length of an entire defined polypeptide sequence, or may be measured over a shorter length, for example, over the length of a fragment taken from a larger, defined polypeptide sequence, for instance, a fragment of at least 10, at least 15, at least 20, at least 30, at least 40, at least 50, at least 70 or at least 150 contiguous residues. Such lengths are exemplary only, and it is understood that any fragment length supported by the sequences shown herein, in the tables, figures or Sequence Listing, may be used to describe a length over which percentage identity may be measured.

[0113] “Repetitiveness” used in the context of polynucleotide sequences refers to the degree of internal homology in the sequence such as, for example, the frequency of identical nucleotide sequences of a given length. Repetitiveness can, for example, be measured by analyzing the frequency of identical sequences.

[0114] The term “expression” as used herein refers to a process by which a polynucleotide produces a gene product, for example, an RNA or a polypeptide. It includes without limitation transcription of the polynucleotide into messenger RNA (mRNA), transfer RNA (tRNA), small hairpin RNA (shRNA), small interfering RNA (siRNA) or any other RNA product, and the translation of an mRNA into a polypeptide. Expression produces a “gene product.” As used herein, a gene product can be either a nucleic acid, e.g., a messenger RNA produced by transcription of a gene, or a polypeptide which is translated from a transcript. Gene products described herein further include nucleic acids with post transcriptional modifications, e.g., polyadenylation or splicing, or polypeptides with post translational modifications, e.g., methylation, glycosylation, the addition of lipids, association with other protein subunits, or proteolytic cleavage.

[0115] A “vector” or “expression vector” are used interchangeably and refers to a nucleic acid molecule, preferably self-replicating in an appropriate host, which transfers an inserted nucleic acid molecule into and/or between host cells. The term includes vectors that function primarily for insertion of DNA or RNA into a cell, replication of vectors that function primarily for the replication of DNA or RNA, and expression vectors that function for transcription and/or translation of the DNA or RNA. Also included are vectors that provide more than one of the above functions. An “expression vector” is a polynucleotide which, when introduced into an appropriate host cell, can be transcribed and translated into a polypeptide(s). An “expression system” usually connotes a suitable host cell comprised of an expression vector that can function to yield a desired expression product.

[0116] “Serum degradation resistance,” as applied to a polypeptide, refers to the ability of the polypeptides to withstand degradation in blood or components thereof, which typically involves proteases in the serum or plasma. The serum degradation resistance can be measured by combining the protein with human (or mouse, rat, dog, monkey, as appropriate) serum or plasma, typically for a range of days (e.g. 0.25, 0.5, 1, 2, 4, 8, 16 days), typically at about 37° C. The samples for these time points can be run on a Western blot assay and the protein is detected with an antibody. The antibody can be to a tag in the protein. If the protein shows a single band on the western, where the protein’s size is identical to that of the injected protein, then no degradation has occurred. In this exemplary method, the time point where 50% of the protein is degraded, as judged by Western blots or equivalent techniques, is the serum degradation half-life or “serum half-life” of the protein.

[0117] The terms “t_{½}”, “half-life”, “terminal half-life”, “elimination half-life” and “circulating half-life” are used interchangeably herein and, as used herein means the terminal half-life calculated as 1n(2)/Kₑ₁. Kₑ₁ is the terminal elimination rate constant calculated by linear regression of the terminal linear portion of the log concentration vs. time curve. Half-life typically refers to the time required for half the quantity of an administered substance deposited in a living organism to be metabolized or eliminated by normal biological processes. When a clearance curve of a given polypeptide is constructed as a function of time, the curve is usually biphasic with a rapid α-phase and longer β-phase. The typical β-phase half-life of a human antibody in humans is 21 days. Half-life can be measured using timed samples from anybody fluid, but is most typically measured in plasma samples.

[0118] The term “molecular weight” generally refers to the sum of atomic weights of the constituent atoms in a molecule. Molecular weight can be determined theoretically by summing the atomic masses of the constituent atoms in a molecule. When applied in the context of a polypeptide, the molecular weight is calculated by adding, based on amino acid composition, the molecular weight of each type of amino acid in the composition or by estimation from comparison to molecular weight standards in an SDS electrophoresis gel. The calculated molecular weight of a molecule can differ from the “apparent molecular weight” of a molecule, which generally refers to the molecular weight of a molecule as determined by one or more analytical techniques. “Apparent molecular weight factor” and “apparent molecular weight” are related terms and when used in the context of a polypeptide, the terms refer to a measure of the relative increase or decrease in apparent molecular weight exhibited by a particular amino acid or polypeptide sequence. The apparent molecular weight can be determined, for example, using size exclusion chromatography (SEC) or similar methods by comparing to globular protein standards, as measured in “apparent kD” units. The apparent molecular weight factor is the ratio between the apparent molecular weight and the “molecular weight”; the latter is calculated by adding, based on amino acid composition as described above, or by estimation from comparison to molecular weight standards in an SDS electrophoresis gel. The determination of apparent molecular weight and apparent molecular weight factor is described in U.S. Pat. No. 8,673,860.

[0119] A “defined medium” refers to a medium comprising nutritional and hormonal requirements necessary for the survival and/or growth of the cells in culture such that the components of the medium are known. Traditionally, the defined medium has been formulated by the addition of nutritional and growth factors necessary for growth and/or survival. Typically, the defined medium provides at least one component from one or more of the following categories: a) all essential amino acids, and usually the basic set of twenty amino acids plus cysteine; b) an energy source, usually in the form of a carbohydrate such as glucose; c) vitamins and/or other organic compounds required at low concentrations; d) free fatty acids; and e) trace elements, where trace elements are defined as inorganic compounds or naturally occurring elements that are typically required at very low concentrations, usually in the micromolar range. The defined medium may also optionally be supplemented with one or more components from any of the following categories: a) one or more mitogenic agents; b) salts and buffers as, for example, calcium, magnesium, and phosphate; c) nucleosides and bases such as, for example, adenosine and thymidine, hypoxanthine; and d) protein and tissue hydrolysates.

[0120] The term “agonist” is used in the broadest sense and includes any molecule that mimics a biological activity of a native polypeptide disclosed herein. Suitable agonist molecules specifically include agonist antibodies or antibody fragments, fragments or amino acid sequence variants of native polypeptides, peptides, small organic molecules, etc. Methods for identifying agonists of a native polypeptide may comprise contacting a native polypeptide with a candidate agonist molecule and measuring a detectable change in one or more biological activities normally associated with the native polypeptide.

[0121] As used herein, “treatment” or “treating,” or “palliating,” or “ameliorating” are used interchangeably herein. These terms refer to an approach for obtaining beneficial or desired results including but not limited to a therapeutic benefit and/or a prophylactic benefit. By therapeutic benefit is meant eradication or amelioration of the underlying disorder being treated. Also, a therapeutic benefit is achieved with the eradication or amelioration of one or more of the physiological symptoms or improvement in one or more clinical parameters associated with the underlying disorder such that an improvement is observed in the subject, notwithstanding that the subject may still be afflicted with the underlying disorder. For prophylactic benefit, the compositions may be administered to a subject at risk of developing a particular disease, or to a subject reporting one or more of the physiological symptoms of a disease, even though a diagnosis of this disease may not have been made.

[0122] A “therapeutic effect” or “therapeutic benefit,” as used herein, refers to a physiologic effect, including but not limited to the mitigation, amelioration, or prevention of disease or an improvement in one or more clinical parameters associated with the underlying disorder in a subject, or to otherwise enhance physical or mental wellbeing of a subject, resulting from administration of a polypeptide of the invention other than the ability to induce the production of an antibody against an antigenic epitope possessed by the biologically active protein. For prophylactic benefit, the compositions may be administered to a subject at risk of developing a particular disease, a recurrence of a former disease, condition or symptom of the disease, or to a subject reporting one or more of the physiological symptoms of a disease, even though a diagnosis of this disease may not have been made.

[0123] The terms “therapeutically effective amount” and “therapeutically effective dose”, as used herein, refer to an amount of a drug or a biologically active protein, either alone or as a part of a composition, that is capable of having any detectable, beneficial effect on any symptom, aspect, measured parameter or characteristics of a disease state or condition when administered in one or repeated doses to a subject. Such effect need not be absolute to be beneficial. Determination of a therapeutically effective amount is well within the capability of those skilled in the art, especially in light of the detailed disclosure provided herein.

[0124] The term “therapeutically effective and non-toxic dose” as used herein refers to a tolerable dose of the compositions as defined herein that is high enough to cause depletion of tumor or cancer cells, tumor elimination, tumor shrinkage or stabilization of disease without or essentially without major toxic effects in the subject. Such therapeutically effective and non-toxic doses may be determined by dose escalation studies described in the art and should be below the dose inducing severe adverse side effects.

[0125] The term “therapeutic index”, as used herein, refers to the ratio of the blood concentration at which a drug becomes toxic and the concentration at which the drug is effective. One exemplary ratio of therapeutic index is LD₅₀:ED₅₀, wherein LD₅₀ is the dose resulting in 50% mortality in a populations of subjects and ED₅₀ is the dose resulting in effectiveness in a population of subjects.

[0126] The term “dose regimen”, as used herein, refers to a schedule for consecutively administered multiple doses (i.e., at least two or more) of a composition, wherein the doses are given in therapeutically effective amounts to result in sustained beneficial effect on any symptom, aspect, measured parameter, endpoint, or characteristic of a disease state or condition in a subject.

[0127] As used herein, “administering” is meant a method of giving a dosage of a compound (e.g., an anti-CD3 antibody of the invention) or a composition (e.g., a pharmaceutical composition including an anti-CD3 antibody of the invention) to a subject.

[0128] A “subject” is a mammal. Mammals include, but are not limited to, domesticated animals (e.g., cows, sheep, cats, dogs, and horses), primates (e.g., humans and non-human primates such as monkeys), rabbits, and rodents (e.g., mice and rats). In certain embodiments, the subject or individual is a human.

[0129] The terms “cancer” and “cancerous” refer to or describe the physiological condition in mammals that is typically characterized by unregulated cell growth/proliferation. Examples of cancer include, but are not limited to, carcinomas, Hodgkin’s lymphoma, non-Hodgkin’s lymphoma, B cell lymphoma, T-cell lymphoma, follicular lymphoma, mantle cell lymphoma, blastoma, breast cancer, colon cancer, prostate cancer, head and neck cancer, any form of skin cancer, melanoma, genito-urinary tract cancer, ovarian cancer, ovarian cancer with malignant ascites, peritoneal carcinomatosis, uterine serous carcinoma, endometrial cancer, cervical cancer, colorectal cancer, an epithelia intraperitoneal malignancy with malignant ascites, uterine cancer, mesothelioma in the peritoneum kidney cancers, lung cancer, small-cell lung cancer, non-small cell lung cancer, gastric cancer, esophageal cancer, stomach cancer, small intestine cancer, liver cancer, hepatocarcinoma, hepatoblastoma, liposarcoma, pancreatic cancer, gall bladder cancer, cancers of the bile duct, salivary gland carcinoma, thyroid cancer, epithelial cancer, adenocarcinoma, sarcomas of any origin, primary hematologic malignancies including acute or chronic lymphocytic leukemias, acute or chronic myelogenous leukemias, myeloproliferative neoplastic disorders, or myelodysplastic disorders, myasthenia gravis, Morbus Basedow, Hashimoto thyroiditis, or Goodpasture syndrome.

[0130] “Tumor,” as used herein, refers to all neoplastic cell growth and proliferation, whether malignant or benign, and all pre-cancerous and cancerous cells and tissues. The terms “cancer”, “cancerous”, “cell proliferative disorder”, “proliferative disorder,” and “tumor” are not mutually exclusive as used herein.

[0131] “Tumor-specific marker” as used herein, refers to an antigen that is found on or in a cancer cell that may be, but is not necessarily, found in higher numbers in or on the cancer cell relative to normal cells or tissues.

### I). General Techniques

[0132] The practice of the present invention employs, unless otherwise indicated, conventional techniques of immunology, biochemistry, chemistry, molecular biology, microbiology, cell biology, genomics and recombinant DNA, which are within the skill of the art. See Sambrook, J. et al., “Molecular Cloning: A Laboratory Manual,” 3^{rd} edition, Cold Spring Harbor Laboratory Press, 2001; “Current protocols in molecular biology”, F. M. Ausubel, et al. eds., 1987; the series “Methods in Enzymology,” Academic Press, San Diego, CA.; “PCR 2: a practical approach”, M.J. MacPherson, B.D. Hames and G.R. Taylor eds., Oxford University Press, 1995; “Antibodies, a laboratory manual” Harlow, E. and Lane, D. eds., Cold Spring Harbor Laboratory, 1988; “Goodman & Gilman’s The Pharmacological Basis of Therapeutics,” 11^{th} Edition, McGraw-Hill, 2005; and Freshney, R.I., “Culture of Animal Cells: A Manual of Basic Technique,” 4^{th} edition, John Wiley & Sons, Somerset, NJ, 2000, the contents of which are incorporated in their entirety herein by reference.

[0133] Host cells can be cultured in a variety of media. Commercially available media such as Ham’s F10 (Sigma), Minimal Essential Medium (MEM, Sigma), RPMI-1640 (Sigma), and Dulbecco’s Modified Eagle’s Medium (DMEM, Sigma) are suitable for culturing eukaryotic cells. In addition, animal cells can be grown in a defined medium that lacks serum but is supplemented with hormones, growth factors or any other factors necessary for the survival and/or growth of a particular cell type. Whereas a defined medium supporting cell survival maintains the viability, morphology, capacity to metabolize and potentially, capacity of the cell to differentiate, a defined medium promoting cell growth provides all chemicals necessary for cell proliferation or multiplication. The general parameters governing mammalian cell survival and growth in vitro are well established in the art. Physicochemical parameters which may be controlled in different cell culture systems are, e.g., pH, pO₂, temperature, and osmolarity. The nutritional requirements of cells are usually provided in standard media formulations developed to provide an optimal environment. Nutrients can be divided into several categories: amino acids and their derivatives, carbohydrates, sugars, fatty acids, complex lipids, nucleic acid derivatives and vitamins. Apart from nutrients for maintaining cell metabolism, most cells also require one or more hormones from at least one of the following groups: steroids, prostaglandins, growth factors, pituitary hormones, and peptide hormones to proliferate in serum-free media (Sato, G. H., et al. in “Growth of Cells in Hormonally Defined Media”, Cold Spring Harbor Press, N.Y., 1982). In addition to hormones, cells may require transport proteins such as transferrin (plasma iron transport protein), ceruloplasmin (a copper transport protein), and high-density lipoprotein (a lipid carrier) for survival and growth in vitro. The set of optimal hormones or transport proteins will vary for each cell type. Most of these hormones or transport proteins have been added exogenously or, in a rare case, a mutant cell line has been found which does not require a particular factor. Those skilled in the art will know of other factors required for maintaining a cell culture without undue experimentation.

[0134] Growth media for growth of prokaryotic host cells include nutrient broths (liquid nutrient medium) or LB medium (Luria Bertani). Suitable media include defined and undefined media. In general, media contains a carbon source such as glucose needed for bacterial growth, water, and salts. Media may also include a source of amino acids and nitrogen, for example beef or yeast extract (in an undefined medium) or known quantities of amino acids (in a defined medium). In some embodiments, the growth medium is LB broth, for example LB Miller broth or LB Lennox broth. LB broth comprises peptone (enzymatic digestion product of casein), yeast extract and sodium chloride. In some embodiments, a selective medium is used which comprises an antibiotic. In this medium, only the desired cells possessing resistance to the antibiotic will grow.

### II). EGFR Antigen Binding Compositions

[0135] In a first aspect, the disclosure provides polypeptides comprising a first antigen binding fragment (AF1) that binds to epidermal growth factor (EGFR) or an epitope thereof. The antigen binding fragments that bind EGFR antigens have particular utility for pairing with a second antigen binding fragment (AF2) with binding affinity to CD3 antigen (or other antigen) of an effector cell in compositions designed in specific formats in order to effect cell killing of diseased cells or tissues bearing EGFR antigens. Binding specificity can be determined by complementarity determining regions, or CDRs, such as light chain CDRs or heavy chain CDRs. In many cases, binding specificity is determined by light chain CDRs and heavy chain CDRs. A given combination of heavy chain CDRs and light chain CDRs provides a given binding pocket that confers greater affinity and/or specificity towards EGFR as compared to other reference antigens.

[0136] The origin of the antigen binding fragments contemplated by the disclosure can be derived from a naturally occurring antibody or fragment thereof, a non-naturally occurring antibody or fragment thereof, a humanized antibody or fragment thereof, a synthetic antibody or fragment thereof, a hybrid antibody or fragment thereof, or an engineered antibody or fragment thereof. Methods for generating an antibody for a given target marker are well known in the art. For example, the monoclonal antibodies may be made using the hybridoma method described by Kohler et al., Nature, 256:495 (1975), or may be made by recombinant DNA methods (U.S. Pat. No. 4,816,567). The structure of antibodies and fragments thereof, variable regions of heavy and light chains of an antibody (VH and VL), single chain variable regions (scFv), complementarity determining regions (CDR), and domain antibodies (dAbs) are well understood. Methods for generating a polypeptide having a desired EGFR antigen binding fragment are known in the art.

[0137] Various EGFR binding antigen binding fragments of the disclosure have been specifically modified to enhance their stability in the polypeptide embodiments described herein relative to EGFR antibodies and antigen binding fragments known in the art. Protein aggregation of monoclonal antibodies continues to be a significant problem in their developability and remains a major area of focus in antibody production. Antibody aggregation can be triggered by partial unfolding of its domains, leading to monomer-monomer association followed by nucleation and aggregate growth. Although the aggregation propensities of antibodies and antibody-based proteins can be affected by the external experimental conditions, they are strongly dependent on the intrinsic antibody properties as determined by their sequences and structures. Although it is well known that proteins are only marginally stable in their folded states, it is often less well appreciated that most proteins are inherently aggregation-prone in their unfolded or partially unfolded states, and the resulting aggregates can be extremely stable and long-lived. Reduction in aggregation propensity has also been shown to be accompanied by an increase in expression titer, showing that reducing protein aggregation is beneficial throughout the development process and can lead to a more efficient path to clinical studies. For therapeutic proteins, aggregates are a significant risk factor for deleterious immune responses in patients, and can form via a variety of mechanisms. Controlling aggregation can improve protein stability, manufacturability, attrition rates, safety, formulation, titers, immunogenicity, and solubility. The intrinsic properties of proteins such as size, hydrophobicity, electrostatics and charge distribution play important roles in protein solubility. Low solubility of therapeutic proteins due to surface hydrophobicity has been shown to render formulation development more difficult and may lead to poor bio-distribution, undesirable pharmacokinetics behavior and immunogenicity in vivo. Decreasing the overall surface hydrophobicity of candidate monoclonal antibodies can also provide benefits and cost savings relating to purification and dosing regimens. Individual amino acids can be identified by structural analysis as being contributory to aggregation potential in an antibody, and can be located in CDR as well as framework regions. In particular, residues can be predicted to be at high risk of causing hydrophobicity issues in a given antibody. In one embodiment, the present disclosure provides an antigen binding fragment having the capability to specifically bind EGFR in which the antigen binding fragment has at least one amino acid substitution of a hydrophobic amino acid in a framework region relative to the parental antibody or antibody fragment wherein the hydrophobic amino acid is selected from isoleucine, leucine or methionine. In another embodiment, the EGFR antigen binding fragment has at least two amino acid substitutions of hydrophobic amino acids in one or more framework regions wherein the hydrophobic amino acids are selected from isoleucine, leucine or methionine.

[0138] In the context of the subject antigen binding fragments, the isoelectric point (pI) is the pH at which the antibody fragment has no net electrical charge. If the pH is below the pI of an antibody fragment, then it will have a net positive charge. A greater positive charge tends to correlate with increased blood clearance and tissue retention, with a generally shorter half-life. If the pH is greater than the pI of an antibody fragment it will have a negative charge. A negative charge generally results in decreased tissue uptake and a longer half-life. It is possible to manipulate this charge through mutations to the framework residues. These considerations informed the design of various sequences of the antigen binding fragments of the embodiments described herein wherein individual amino acid substitutions were made relative to the parental antibody utilized as the starting point. The isoelectric point of a polypeptide can be determined mathematically or experimentally in an in vitro assay. The isoelectric point (pI) is the pH at which a protein has a net charge of zero and can be calculated using the charges for the specific amino acids in the protein sequence. Estimated values for the charges are called acid dissociation constants or pKa values and are used to calculate the pI. The pI can be determined in vitro by methods such as capillary isoelectric focusing (see Datta-Mannan, A., et al. The interplay of non-specific binding, target-mediated clearance and FcRn interactions on the pharmacokinetics of humanized antibodies. mAbs 7:1084 (2015); Li, B., et al. Framework selection can influence pharmacokinetics of a humanized therapeutic antibody through differences in molecule charge. mAbs 6, 1255-1264 (2014)) or other methods known in the art.

[0139] In some aspects of any of the embodiments disclosed herein, a subject polypeptide comprising an AF1 comprises light chain complementarity-determining regions (CDR-L) and heavy chain complementarity-determining regions (CDR-H) listed in Table 1 wherein the AF1 binds EGFR or an epitope thereof. Additionally or alternatively, a subject AFlof the disclosure can comprise a CDR-L or a CDR-H with at least 60% identity to any of the CDR-L or CDR-H listed in Table 1. In some aspects, a subject AFlof the disclosure can comprise CDR-L or CDR-H can exhibit at least 65%, 70%, 75%, 80%, 85%, 90%, 95%, 99%, or greater sequence identity to any of the SEQ ID NOs listed in Table 1. Additionally, the subject AF1 of the embodiments can further comprise light chain framework regions (FR-L) and heavy chain framework regions (FR-H) listed in Table 2. In some aspects, a subject AFlof the disclosure can comprise FR-L or FR-H that exhibit at least 65%, 70%, 75%, 80%, 85%, 90%, 95%, 99%, or greater sequence identity to any of the SEQ ID NOs listed in Table 2. In one embodiment, the AF1 of any of the subject composition embodiments described herein is a chimeric or a humanized antigen binding fragment. In another embodiment, the AF1 of any of the subject composition embodiments described herein is selected from the group consisting of Fv, Fab, Fab′, Fab′-SH, linear antibody, and single-chain variable fragment (scFv). The AF1 having CDR-H and CDR-L can be configured in a (CDR-H)-(CDR-L) or a (CDR-H)-(CDR-L) orientation, N-terminus to C-terminus.

[0140] In one embodiment, the present disclosure provides polypeptides comprising an AF1 wherein the AF1 comprises CDR-L and CDR-H, and heavy chain framework regions (FR-H), and wherein the AF1, (a) specifically binds to EGFR; (b) comprises FR-H1, FR-H2, FR-H3, and FR-H4, wherein FR-H1 has an amino acid sequence of any one of SEQ ID NOS: 14-16, FR-H2 has an amino acid sequence of SEQ ID NO:18 or SEQ ID NO:19, FR-H3 has an amino acid sequence of SEQ ID NO: 20 or SEQ ID NO:21, and FR-H4 has an amino acid sequence of any one of SEQ ID NOS: 22-24. In another embodiment, a polypeptide of a subject composition embodiment described herein comprises an AF1, wherein the AF1 comprises a CDR-H3 wherein the CDR-H3 has an amino acid sequence of SEQ ID NO: 6. In another embodiment, the AF1 comprises CDR-H1, CDR-H2, and CDR-H3, having amino acid sequences of SEQ ID NOS: 4, 5, and 6, respectively.

[0141] In another embodiment, the present disclosure provides polypeptides comprising an AF1, wherein the AF1 has a higher isoelectric point (pI) relative to that of an antigen binding fragment consisting of a sequence shown in SEQ ID NO:52, as evidenced by an in vitro assay. In one embodiment, the AF1 is incorporated into the polypeptide to form an anti-EGFR bispecific antibody wherein the polypeptide exhibits a higher pI relative to a control bispecific antibody, wherein said polypeptide comprises said AF1 and a reference antigen binding fragment that binds to a cluster of differentiation 3 T cell receptor (CD3), and wherein said control bispecific antigen binding fragment is identical to the polypeptide except that the AF1 is replaced with SEQ ID NO:52 . In the foregoing embodiment, the AF1 exhibits a pI that is at least 0.1, 0.2, 0.3, 0.4, 0.5, 0.6, 0.7, 0.8, 0.9, 1.0, 1.1, 1.2, 1.3, 1.4 or 1.5 pH units higher than the pI of the antigen binding fragment consisting of a sequence shown in SEQ ID NO:52. In the foregoing embodiments, the in vitro assay for determining the pI can be capillary isoelectrophoresis focusing or other assays known in the art.

[0142] In another embodiment, a polypeptide of any of the subject composition embodiments described herein comprises an AF1, wherein the AF1 comprises CDR-L, CDR-H, light chain framework regions (FR-L) and heavy chain framework regions (FR-H) and wherein the AF1 (a) is configured to specifically bind to EGFR; (b) comprises CDR-H1, CDR-H2, and CDR-H3, having amino acid sequences of SEQ ID NOS: 4, 5, and 6, respectively; (c) comprises FR-H1, FR-H2, FR-H3, and FR-H4, each exhibiting at least 86%, 87%, 88%, 89%, 90%, 91%, 92%, 93%, 94%, 95%, 96%, 97%, 98%, 99% sequence identity or is identical to an amino acid of SEQ ID NOS: 14-16, SEQ ID NOS: 18 and 19, SEQ ID NOS: 20 and 21, and SEQ ID NOS: 22-24, respectively, and further comprises FR-L wherein the FR-L comprise: (a) a FR-L1 exhibiting at least 86%, 87%, 88%, 89%, 90%, 91%, 92%, 93%, 94%, 95%, 96%, 97%, 98%, 99% sequence identity or is identical to the amino acid sequence of SEQ ID NO: 7, (b) a FR-L2 exhibiting at least 86%, 87%, 88%, 89%, 90%, 91%, 92%, 93%, 94%, 95%, 96%, 97%, 98%, 99% sequence identity or is identical to the amino acid sequence of SEQ ID NO: 8, (c) a FR-L3 exhibiting at least 86%, 87%, 88%, 89%, 90%, 91%, 92%, 93%, 94%, 95%, 96%, 97%, 98%, 99% sequence identity or is identical to the amino acid sequence of SEQ ID NO: 9, and (d) a FR-L4 exhibiting at least 86%, 87%, 88%, 89%, 90%, 91%, 92%, 93%, 94%, 95%, 96%, 97%, 98%, 99% sequence identity or is identical to the amino acid sequence of SEQ ID NO: 13.

[0143] In another embodiment, a polypeptide of any of the subject composition embodiments described herein comprises an AF1, wherein the AF1 comprises CDR-L, CDR-H, light chain framework regions (FR-L) and heavy chain framework regions (FR-H) and wherein the AF1: (a) is configured to specifically bind to EGFR; (b) comprises CDR-H1, CDR-H2, and CDR-H3, having amino acid sequences of SEQ ID NOS: 4, 5, and 6, respectively; (c) comprises FR-H1, FR-H2, FR-H3, and FR-H4, each exhibiting at least 86%, 87%, 88%, 89%, 90%, 91%, 92%, 93%, 94%, 95%, 96%, 97%, 98%, 99% sequence identity or is identical to an amino acid of SEQ ID NOS:14-16, SEQ ID NOS: 18 and 19, SEQ ID NOS: 18 and 19, SEQ ID NOS: 20 and 21, and SEQ ID NOS: 22-24, respectively; and (d) further comprises FR-L wherein the FR-L comprise (i) a FR-L1 exhibiting at least 86%, 87%, 88%, 89%, 90%, 91%, 92%, 93%, 94%, 95%, 96%, 97%, 98%, 99% sequence identity or is identical to the amino acid sequence of SEQ ID NO: 7, (ii) a FR-L2 exhibiting at least 86%, 87%, 88%, 89%, 90%, 91%, 92%, 93%, 94%, 95%, 96%, 97%, 98%, 99% sequence identity or is identical to the amino acid sequence of SEQ ID NO: 8, (iii) a FR-L3 exhibiting at least 86%, 87%, 88%, 89%, 90%, 91%, 92%, 93%, 94%, 95%, 96%, 97%, 98%, 99% sequence identity or is identical to the amino acid sequence of SEQ ID NO: 10, and (iv) a FR-L4 exhibiting at least 86%, 87%, 88%, 89%, 90%, 91%, 92%, 93%, 94%, 95%, 96%, 97%, 98%, 99% sequence identity or is identical to the amino acid sequence of SEQ ID NO: 13.

[0144] In another embodiment, a polypeptide of any of the subject composition embodiments described herein comprises an AF1, wherein the AF1 comprises CDR-L, CDR-H, light chain framework regions (FR-L) and heavy chain framework regions (FR-H) and wherein the AF1: (a) is configured to specifically bind to EGFR; (b) comprises CDR-H1, CDR-H2, and CDR-H3, having amino acid sequences of SEQ ID NOS: 4, 5, and 6, respectively; (c) comprises FR-H1, FR-H2, FR-H3, and FR-H4, each exhibiting at least 86%, 87%, 88%, 89%, 90%, 91%, 92%, 93%, 94%, 95%, 96%, 97%, 98%, 99% sequence identity or is identical to an amino acid of SEQ ID NOS: 14-16, SEQ ID NOS: 18 and 19, SEQ ID NOS: 20 and 21, and SEQ ID NOS: 22-24, respectively; and (d) further comprises FR-L wherein the FR-L comprise: (i) a FR-L1 exhibiting at least 86%, 87%, 88%, 89%, 90%, 91%, 92%, 93%, 94%, 95%, 96%, 97%, 98%, 99% sequence identity or is identical to the amino acid sequence of SEQ ID NO: 7, (ii) a FR-L2 exhibiting at least 86%, 87%, 88%, 89%, 90%, 91%, 92%, 93%, 94%, 95%, 96%, 97%, 98%, 99% sequence identity or is identical to the amino acid sequence of SEQ ID NO: 8, (iii) a FR-L3 exhibiting at least 86%, 87%, 88%, 89%, 90%, 91%, 92%, 93%, 94%, 95%, 96%, 97%, 98%, 99% sequence identity or is identical to the amino acid sequence of SEQ ID NO: 11, and (iv) a FR-L4 exhibiting at least 86%, 87%, 88%, 89%, 90%, 91%, 92%, 93%, 94%, 95%, 96%, 97%, 98%, 99% sequence identity or is identical to the amino acid sequence of SEQ ID NO: 13.

[0145] In another embodiment, a polypeptide of any of the subject composition embodiments described herein comprises an AF1, wherein the AF1 comprises CDR-L, CDR-H, light chain framework regions (FR-L) and heavy chain framework regions (FR-H) and wherein the AF1: (a) is configured to specifically bind to EGFR; (b) comprises CDR-H1, CDR-H2, and CDR-H3, having amino acid sequences of SEQ ID NOS: 4, 5, and 6, respectively; (c) comprises FR-L1, FR-L2, FR-L3, and FR-L4, each exhibiting at least 86%, 87%, 88%, 89%, 90%, 91%, 92%, 93%, 94%, 95%, 96%, 97%, 98%, 99% sequence identity or is identical to an amino acid of SEQ ID NO:7, SEQ ID NO:8, SEQ ID NOS:9-11, SEQ ID NO: 13; and (d) comprises FR-H1, FR-H2, FR-H3, and FR-H4, wherein the FR-H1 exhibits at least 86%, 87%, 88%, 89%, 90%, 91%, 92%, 93%, 94%, 95%, 96%, 97%, 98%, 99% sequence identity or is identical to an amino acid sequence of SEQ ID NO: 14, wherein the FR-H2 exhibits exhibiting at least 86%, 87%, 88%, 89%, 90%, 91%, 92%, 93%, 94%, 95%, 96%, 97%, 98%, 99% sequence identity or is identical to the amino acid sequence of SEQ ID NO: 18, wherein the FR-H3 exhibits at least 86%, 87%, 88%, 89%, 90%, 91%, 92%, 93%, 94%, 95%, 96%, 97%, 98%, 99% sequence identity or is identical to the amino acid sequence of SEQ ID NO:20, and wherein the FR-H4 exhibits at least 86%, 87%, 88%, 89%, 90%, 91%, 92%, 93%, 94%, 95%, 96%, 97%, 98%, 99% sequence identity or is identical to the amino acid sequence of SEQ ID NO: 22 or 23.

[0146] In another embodiment, a polypeptide of any of the subject composition embodiments described herein comprises an AF1, wherein the AF1 comprises CDR-L, CDR-H, light chain framework regions (FR-L) and heavy chain framework regions (FR-H) and wherein the AF1 (a) is configured to specifically bind to EGFR; (b) comprises CDR-H1, CDR-H2, and CDR-H3, having amino acid sequences of SEQ ID NOS: 4, 5, and 6, respectively; (c) comprises FR-L1, FR-L2, FR-L3, and FR-L4, each exhibiting at least 86%, 87%, 88%, 89%, 90%, 91%, 92%, 93%, 94%, 95%, 96%, 97%, 98%, 99% sequence identity or is identical to an amino acid of SEQ ID NO:7, SEQ ID NO:8, SEQ ID NOS: 9-11, and SEQ ID NO: 13, respectively; and (d) comprises FR-H1, FR-H2, FR-H3, and FR-H4, wherein the FR-H1 exhibits at least 86%, 87%, 88%, 89%, 90%, 91%, 92%, 93%, 94%, 95%, 96%, 97%, 98%, 99% sequence identity or is identical to a FR-H1 having an amino acid sequence of SEQ ID NO: 15, wherein the FR-H2 exhibits at least 86%, 87%, 88%, 89%, 90%, 91%, 92%, 93%, 94%, 95%, 96%, 97%, 98%, 99% sequence identity or is identical to the amino acid sequence of SEQ ID NO: 19, wherein the FR-H3 exhibits at least 86%, 87%, 88%, 89%, 90%, 91%, 92%, 93%, 94%, 95%, 96%, 97%, 98%, 99% sequence identity or is identical to the amino acid sequence of SEQ ID NO: 21, and wherein the FR-H4 exhibits at least 86%, 87%, 88%, 89%, 90%, 91%, 92%, 93%, 94%, 95%, 96%, 97%, 98%, 99% sequence identity or is identical to the amino acid sequence of SEQ ID NO: 24.

[0147] In yet another embodiment, a polypeptide of any of the subject composition embodiments described herein comprises an AF1, wherein the AF1 comprises CDR-L, CDR-H, light chain framework regions (FR-L) and heavy chain framework regions (FR-H) and wherein the AF1 (a) is configured to specifically bind to EGFR; (b) comprises CDR-H1, CDR-H2, and CDR-H3, having amino acid sequences of SEQ ID NOS: 4, 5, and 6, respectively; (c) comprises FR-L1, FR-L2, FR-L3, and FR-L4, each exhibiting at least 86%, 87%, 88%, 89%, 90%, 91%, 92%, 93%, 94%, 95%, 96%, 97%, 98%, 99% sequence identity or is identical to an amino acid of SEQ ID NO:7, SEQ ID NO:8, SEQ ID NOS: 9-11, and SEQ ID NO: 13; and (d) comprises FR-H1, FR-H2, FR-H3, and FR-H4, wherein the FR-H1 exhibits at least 86%, 87%, 88%, 89%, 90%, 91%, 92%, 93%, 94%, 95%, 96%, 97%, 98%, 99% sequence identity or is identical to a FR-H1 having an amino acid sequence of SEQ ID NO: 16, wherein the FR-H2 exhibits at least 86%, 87%, 88%, 89%, 90%, 91%, 92%, 93%, 94%, 95%, 96%, 97%, 98%, 99% sequence identity or is identical to the amino acid sequence of SEQ ID NO: 19, wherein the FR-H1 exhibits FR-H3 at least 86%, 87%, 88%, 89%, 90%, 91%, 92%, 93%, 94%, 95%, 96%, 97%, 98%, 99% sequence identity or is identical to the amino acid sequence of SEQ ID NO: 20, and wherein the FR-H4 exhibits at least 86%, 87%, 88%, 89%, 90%, 91%, 92%, 93%, 94%, 95%, 96%, 97%, 98%, 99% sequence identity or is identical to the amino acid sequence of SEQ ID NO: 22 or 23.

[0148] In another embodiment, a polypeptide of any of the subject composition embodiments described herein comprises an AF1, wherein the AF1 is configured to specifically bind to EGFR and the AF1 comprises a variable heavy (VH) amino acid sequence having at least 90%, 91%, 92%, 93%, 94%, 95%, 96%, 97%, 98%, 99% sequence identity or is identical to an amino acid sequence of SEQ ID NO: 28-32.

[0149] In another embodiment, a polypeptide of any of the subject composition embodiments described herein comprises an AF1, wherein the AF1 is configured to specifically bind to EGFR wherein the AF1 comprises a variable light (VL) amino acid sequence having at least 90%, 91%, 92%, 93%, 94%, 95%, 96%, 97%, 98%, 99% sequence identity or is identical to an amino acid sequence of SEQ ID NOS: 25-27.

[0150] In another embodiment, a polypeptides of any of the subject composition embodiments described herein comprises an AF1, wherein the AF1 comprises a variable heavy (VH) amino acid sequence having at least 90%, 91%, 92%, 93%, 94%, 95%, 96%, 97%, 98%, 99% sequence identity or is identical to an amino acid sequence of SEQ ID NO: 28-32 and comprises a variable light (VL) amino acid sequence having at least 90%, 91%, 92%, 93%, 94%, 95%, 96%, 97%, 98%, 99% sequence identity or is identical to an amino acid sequence of SEQ ID NOS: 25-27. The AF1 can be configured in a VL-VH or VH-VL orientation, and are fused by a linker peptide.

[0151] In yet another embodiment, a polypeptide of any of the subject composition embodiments described herein comprises an AF1, wherein the AF1 comprises an amino acid sequence having at least 95%, 96%, 97%, 98%, 99% sequence identity or is identical to an amino acid sequence of any one of SEQ ID NOS: 37-51.

[0152] It will be understood that use of the term antigen binding fragments for the composition embodiments disclosed herein is not limiting and is intended to include portions or fragments of antibodies that retain the ability to bind the antigens that are the ligands of the corresponding intact antibody. In such embodiments, the antigen binding fragment can be, but is not limited to, CDRs and intervening framework regions, variable or hypervariable regions of light and/or heavy chains of an antibody (VL, VH), variable fragments (Fv), Fab′ fragments, F(ab′)2 fragments, Fab fragments, single chain antibodies (scAb), VHH camelid antibodies, single chain variable fragment (scFv), linear antibodies, a single domain antibody, complementarity determining regions (CDR), domain antibodies (dAbs), single domain heavy chain immunoglobulins of the BHH or BNAR type, single domain light chain immunoglobulins, or other polypeptides known in the art containing a fragment of an antibody capable of binding an antigen. The VL and VH of two antigen binding fragments can also be configured in a single chain diabody configuration; i.e., the VL and VH of the AF1 and AF2 configured with linkers of an appropriate length to permit arrangement as a diabody.

[0153] In certain embodiments, the VL and VH of the antigen binding fragments are fused by relatively long linkers, consisting of 25, 26, 27, 28, 29, 30, 31, 32, 33, 34, or 35 hydrophilic amino acids that, when joined together, have a flexible characteristic. In one embodiment, the VL and VH of any of the scFv embodiments described herein are linked by relatively long linkers of hydrophilic amino acids selected from the sequences

GSGEGSEGEGGGEGSEGEGSGEGGEGEGSG (SEQ ID NO: 790),

TGSGEGSEGEGGGEGSEGEGSGEGGEGEGSGT (SEQ ID NO: 791),

GATPPETGAETESPGETTGGSAESEPPGEG (SEQ ID NO: 792), o
r

GSAAPTAGTTPSASPAPPTGGSSAAGSPST (SEQ ID NO: 793).

[0154] In yet another embodiment, AF1 of any of the subject composition embodiments described herein specifically binds human or cynomolgus monkey (cyno) EGFR. In another embodiment, AF1 of any of the subject composition embodiments described herein specifically binds human and cynomolgus monkey (cyno) EGFR.

[0155] In another aspect, the disclosure provides AF1 with specific binding affinity to EGFR for incorporation into the subject compositions in which one or more individual amino acids of the framework regions were modified to increase the pI of the AF1 relative to the parental antigen binding fragment in order to enhance the stability of the bispecific polypeptide into which it is incorporated. In one embodiment, the polypeptides of any of the subject composition embodiments described herein comprise an AF1, wherein the AF1 exhibits a pI of about 5.4, or about 5.5, or about 5.6, or about 5.6, or about 5.7, or about 5.8, or about 5.9, or about 6.0, or about 6.1, or about 6.2, or about 6.3, or about 6.4 or about 6.5, or about 6.6, as evidenced by in an in vitro assay. In another embodiment, the polypeptides of any of the subject composition embodiments described herein comprise an AF1, wherein the AF1 exhibits a pI of between 5.4 and 6.6, inclusive, as evidenced by in an in vitro assay. In another embodiment, the polypeptides of any of the subject composition embodiments described herein comprise an AF1, wherein the AF1 exhibits a pI of between about 5.4 and 6.6, or about 5.6 and about 6.4, or about 5.8 and about 6.2, or about 6.0 and about 6.2, or about 6.1 and about 6.3, or about 6.2 and about 6.4, or about 6.3 and about 6.5, or about 6.4 and about 6.6, as determined computationally or evidenced by an in vitro assay.

[0156] In another aspect, the disclosure provides AF1 with specific binding affinity to EGFR for incorporation into the subject compositions in which the binding affinity to the EGFR antigen is within a set range. In one embodiment, the polypeptides of any of the subject composition embodiments described herein comprise an AF1, wherein the AF1 specifically binds EGFR with a K_{d} between about 0.1 nM and about 100 nM, as determined in an in vitro antigen-binding assay comprising the EGFR antigen. In another embodiment, the AF1 specifically binds EGFR with a binding affinity (as determined by the K_{d} in an in vitro binding assay) of less than about 0.1 nM, or less than about 0.5 nM, or less than about 1.0 nM, or less than about 10 nM, or less than about 50 nM, or less than about 100 nM. In another embodiment, the polypeptides of any of the subject composition embodiments described herein comprise an AF1 and an AF2, wherein the binding affinity of the AF1 to EGFR is at least 10-fold greater, or at least 100-fold greater, or at least 1000-fold greater than the binding affinity of the AF2 to CD3, as measured in an in vitro antigen-binding assay. It will be understood that a binding affinity with a lower K_{d} value; e.g., 1 nM, is a greater binding affinity than 10 nM. The binding affinity of the subject compositions for the target ligands can be assayed using binding or competitive binding assays, such as Biacore assays with chip-bound receptors or binding proteins or ELISA assays, as described in U.S. Pat. 5,534,617, assays described in the Examples herein, radio-receptor assays, or other assays known in the art. The binding affinity constant can then be determined using standard methods, such as Scatchard analysis, as described by van Zoelen, et al., Trends Pharmacol Sciences (1998) 19)12):487, or other methods known in the art.

[0157] In another aspect, the disclosure provides AF1 with specific binding affinity to EGFR for incorporation into the subject compositions in which one or more individual amino acids of the framework regions were modified to decrease the hydrophobicity of the antigen-binding framework relative to the parental antigen binding fragment in order to enhance the stability of the bispecific polypeptide into which it is incorporated. In one embodiment, the polypeptides of any of the subject composition embodiments described herein comprise an AF1 wherein the AF1 specifically binds EGFR and wherein the AF1 has at least one amino acid substitution of a hydrophobic amino acid in a framework region, relative to the amino acid sequence of SEQ ID NO:52, wherein the hydrophobic amino acid is selected from isoleucine, leucine or methionine and the substituted amino acid is selected from arginine, threonine, or glutamine. In another embodiment, the AF1 has at least two amino acid substitutions of hydrophobic amino acids in one or more framework regions, relative to the amino acid sequence of SEQ ID NO:52, wherein the hydrophobic amino acids are selected from isoleucine, leucine or methionine and the substituted amino acids are selected from arginine, threonine, or glutamine.

TABLE 1

EGFR CDR SEQUENCES

| Construct | CDR REGION | Amino Acid Sequence | SEQ ID NO: |
|---|---|---|---|
| EGFR.2, EGFR.13, EGFR.14, EGFR.15, EGFR.16, EGFR.17, EGFR.18, EGFR.19, EGFR.20, EGFR.21, EGFR.22, EGFR.23, EGFR.24, EGFR.25, EGFR.26, EGFR.27 | CDR-L1 | QASQDISNYLN | 1 |
| EGFR.2, EGFR.13, EGFR. 14, EGFR.15, EGFR.16, EGFR.17, EGFR.18, EGFR.19, EGFR.20, EGFR.21, EGFR.22, EGFR.23, EGFR.24, EGFR.25, EGFR.26, EGFR.27 | CDR-L2 | DASNLET | 2 |
| EGFR.2, EGFR.13, EGFR. 14, EGFR.15, EGFR.16, EGFR.17, EGFR.18, EGFR.19, EGFR.20, EGFR.21, EGFR.22, EGFR.23, EGFR.24, EGFR.25, EGFR.26, EGFR.27 | CDR-L3 | QHFDHLPLA | 3 |
| EGFR.2, EGFR.13, EGFR. 14, EGFR.15, EGFR.16, EGFR.17, EGFR.18, EGFR.19, EGFR.20, EGFR.21, EGFR.22, EGFR.23, | CDR-H1 | GGSVSSGDYY | 4 |
| EGFR.24, EGFR.25, EGFR.26, EGFR.27 | | | |
| EGFR.2, EGFR.13, EGFR. 14, EGFR.15, EGFR.16, EGFR.17, EGFR.18, EGFR.19, EGFR.20, EGFR.21, EGFR.22, EGFR.23, EGFR.24, EGFR.25, EGFR.26, EGFR.27 | CDR-H2 | HIYYSGNTNYNPSLKS | 5 |
| EGFR.2, EGFR.13, EGFR. 14, EGFR.15, EGFR.16, EGFR.17, EGFR.18, EGFR.19, EGFR.20, EGFR.21, EGFR.22, EGFR.23, EGFR.24, EGFR.25, EGFR.26, EGFR.27 | CDR-H3 | VRDRVTGAFDI | 6 |

TABLE 2

EGFR FR SEQUENCES

| Construct | FR REGION | Amino Acid Sequence | SEQ ID NO: |
|---|---|---|---|
| EGFR.2, EGFR.13, EGFR.14, EGFR.15, EGFR.16, EGFR.17, EGFR.18, EGFR.19, EGFR20, EGFR.21, EGFR.22, EGFR.23, EGFR.24, EGFR.25, EGFR.26, EGFR.27 | FR-L1 | DIQMTQSPSSLSASVGDRVTITC | 7 |
| EGFR.2, EGFR.13, EGFR.14, EGFR.15, EGFR.16, EGFR.17, EGFR.18, EGFR.19, EGFR20, EGFR.21, EGFR.22, EGFR.23, EGFR.24, EGFR.25, EGFR.26, EGFR.27 | FR-L2 | WYQQKPGKAPKLLIY | 8 |
| EGFR.13, EGFR.14, EGFR.15, EGFR.16, EGFR.17, | FR-L3 | GVPSRFSGSGSGTDFTFTISSLQPEDTATYFC | 9 |
| EGFR.18, EGFR.19, EGFR.20, EGFR.21, EGFR.22 | FR-L3 | GVPSRFSGSGSGTDFTFTISRLQPEDIATY FC | 10 |
| EGFR.23, EGFR.24, EGFR.25, EGFR.26, EGFR.27 | FR-L3 | GVPSRFSGSGSGTDFTFTISRLQPEDTAT YFC | 11 |
| EGFR.2 | FR-L3 | GVPSRFSGSGSGTDFTFTISSLQPEDIATY FC | 12 |
| EGFR.2, EGFR.13, EGFR.14, EGFR.15, EGFR.16, EGFR.17, EGFR.18, EGFR.19, EGFR20, EGFR.21, EGFR.22, EGFR.23, EGFR.24, EGFR.25, EGFR.26, EGFR.27 | FR-L4 | FGGGTKVEIK | 13 |
| EGFR.13, EGFR.14, EGFR.18, EGFR.19, EGFR.23, EGFR.24 | FR-H 1 | QVQLQESG PGAVKPS ETLS LTCTVS | 14 |
| EGFR.15, EGFR20, EGFR.25 | FR-H 1 | QVQLQESG PG L VKPSQTLSL TCTVS | 15 |
| EGFR.16, EGFR.17, EGFR.21, EGFR.22, EGFR.26, EGFR.27 | FR-H 1 | QVQLQESG PGA VKPSQTLSL TCTVS | 16 |
| EGFR.2 | FR-H 1 | QVQLQESG PG LVKPS ETLS LTCTVS | 17 |
| EGFR.2, EGFR.13, EGFR.14, EGFR.18, EGFR.19, EGFR.23, EGFR.24 | FR-H2 | WTWIRQSPGKGLEWIG | 18 |
| EGFR.15, EGFR.16, EGFR.17, EGFR.20, EGRF.21, EGFR.22, EGFR.25, EGFR.26, EGFR.27 | FR-H2 | WTWIRQRPGKGLEWIG | 19 |
| EGFR.13, EGFR. 14, EGFR.16, EGFR.17, EGFR.18, EGFR.19, EGFR.21, EGFR.22, EGFR.23, | FR-H3 | R LTI S I DTS KTQFS L K LSSVTAADTATYYC | 20 |
| EGFR.24, EGFR.26, EGFR.27 | | | |
| EGFR.2, EGFR.15, EGFR.20, EGFR25 | FR-H3 | RLTISIDTSKTQFSLKLSSVTAADTAIYYC | 21 |
| EGFR.13, EGFR.16, EGFR.18, EGFR.21, EGFR.23, EGFR.26 | FR-H4 | WGQGTAVTVSS | 22 |
| EGFR.14, EGFR.17, EGFR.19, EGFR.22, EGFR.24, EGFR.27 | FR-H4 | WGQGTTVTVSS | 23 |
| EGFR.2, EGFR.15, EGFR.20, EGFR25 | FR-H4 | WGQGTMVTVSS | 24 |

TABLE 3

EGFR VL & VH SEQUENCES

| Construct | REGION | Amino Acid Sequence | SEQ ID NO: |
|---|---|---|---|
| EGFR.13, EGFR. 14, EGFR.15, EGFR.16, EGFR.17 | VL | DIQMTQSPSSLSASVGDRVTITCQASQDISNYLNWY QQKPGKAPKLLIYDASNLETGVPSRFSGSGSGTDFTFT ISSLQPEDTATYFCQHFDHLPLAFGGGTKVEIK | 25 |
| EGFR.18, EGFR.19, EGRF.20, EGFR.21, EGFR.22 | VL | DIQMTQSPSSLSASVGDRVTITCQASQDISNYLNWY QQKPGKAPKLLIYDASNLETGVPSRFSGSGSGTDFTFT ISRLQPEDIATYFCQHFDHLPLAFGGGTKVEIK | 26 |
| EGFR.23, EGFR.24, EGFR.25, EGFR.26, EGFR.27 | VL | DIQMTQSPSSLSASVGDRVTITCQASQDISNYLNWY QQKPGKAPKLLIYDASNLETGVPSRFSGSGSGTDFTFT ISRLQPEDTATYFCQHFDHLPLAFGGGTKVEIK | 27 |
| EGFR.13, EGFR.18, EGFR.23 | VH | QVQLQESGPGAVKPSETLSLTCTVSGGSVSSGDYYW TWIRQSPGKGLEWIGHIYYSGNTNYNPSLKSRLTISID TSKTQFSLKLSSVTAADTATYYCVRDRVTGAFDIWGQ GTAVTVSS | 28 |
| EGFR.14, EGFR.19, EGFR.24 | VH | QVQLQESGPGAVKPSETLSLTCTVSGGSVSSGDYYW TWIRQSPGKGLEWIGHIYYSGNTNYNPSLKSRLTISID TSKTQFSLKLSSVTAADTATYYCVRDRVTGAFDIWGQ GTTVTVSS | 29 |
| EGFR.15, EGFR.20, EGFR.25 | VH | QVQLQESGPGLVKPSQTLSLTCTVSGGSVSSGDYYW TWIRQRPGKGLEWIGHIYYSGNTNYNPSLKSRLTISID TSKTQFSLKLSSVTAADTAIYYCVRDRVTGAFDIWGQ GTMVTVSS | 30 |
| EGFR.16, EGFR.21, EGFR.26 | VH | QVQLQESGPGAVKPSQTLSLTCTVSGGSVSSGDYYW TWIRQRPGKGLEWIGHIYYSGNTNYNPSLKSRLTISID TSKTQFSLKLSSVTAADTATYYCVRDRVTGAFDIWGQ GTAVTVSS | 31 |
| EGFR.17, EGFR.22, EGFR.27 | VH | QVQLQESGPGAVKPSQTLSLTCTVSGGSVSSGDYYW TWIRQRPGKGLEWIGHIYYSGNTNYNPSLKSRLTISID TSKTQFSLKLSSVTAADTATYYCVRDRVTGAFDIWGQ GTTVTVSS | 32 |
| EGFR.2 | VL | DIQMTQSPSSLSASVGDRVTITCQASQDISNYLNWY QQKPGKAPKLLIYDASNLETGVPSRFSGSGSGTDFTFT ISSLQPEDIATYFCQHFDHLPLAFGGGTKVEIK | 35 |
| EGFR.2 | VH | QVQLQESGPGLVKPSETLSLTCTVSGGSVSSGDYYWT WIRQSPGKGLEWIGHIYYSGNTNYNPSLKSRLTISIDT SKTQFSLKLSSVTAADTAIYYCVRDRVTGAFDIWGQG TMVTVSS | 36 |

TABLE 4

EGFR scFv sequences

| Construct | Amino Acid Sequence | SEQ ID NO: |
|---|---|---|
| EGFR.13 | DIQMTQSPSSLSASVGDRVTITCQASQDISNYLNWYQQKPGKAPKLLIYDASNLET GVPSRFSGSGSGTDFTFTISSLQPEDTATYFCOHFDHLPLAFGGGTKVEIKGATPPET GAETESPGETTGGSAESEPPGEGQVQLQESGPGAVKPSETLSLTCTVSGGSVSSGD YYWTWIRQSPGKGLEWIGHIYYSGNTNYNPSLKSRLTISIDTSKTQFSLKLSSVTAAD TATYYCVRDRVTGAFDIWGQGTAVTVSS | 37 |
| EGFR.14 | DIQMTQSPSSLSASVGDRVTITCQASQDISNYLNWYQQKPGKAPKLLIYDASNLET GVPSRFSGSGSGTDFTFTISSLQPEDTATYFCOHFDHLPLAFGGGTKVEIKGATPPET GAETESPGETTGGSAESEPPGEGQVQLQESGPGAVKPSETLSLTCTVSGGSVSSGD YYWTWIRQSPGKGLEWIGHIYYSGNTNYNPSLKSRLTISIDTSKTQFSLKLSSVTAAD TATYYCVRDRVTGAFDIWGQGTTVTVSS | 38 |
| EGFR.15 | DIQMTQSPSSLSASVGDRVTITCQASQDISNYLNWYQQKPGKAPKLLIYDASNLET GVPSRFSGSGSGTDFTFTISSLQPEDTATYFCOHFDHLPLAFGGGTKVEIKGATPPET GAETESPGETTGGSAESEPPGEGQVQLQESGPGLVKPSQTLSLTCTVSGGSVSSGD YYWTWIRQRPGKGLEWIGHIYYSGNTNYNPSLKSRLTISIDTSKTQFSLKLSSVTAAD TAIYYCVRDRVTGAFDIWGQGTMVTVSS | 39 |
| EGFR.16 | DIQMTQSPSSLSASVGDRVTITCQASQDISNYLNWYQQKPGKAPKLLIYDASNLET GVPSRFSGSGSGTDFTFTISSLQPEDTATYFCOHFDHLPLAFGGGTKVEIKGATPPET GAETESPGETTGGSAESEPPGEGQVQLQESGPGAVKPSQTLSLTCTVSGGSVSSGD YYWTWIRQRPGKGLEWIGHIYYSGNTNYNPSLKSRLTISIDTSKTQFSLKLSSVTAAD TATYYCVRDRVTGAFDIWGQGTAVTVSS | 40 |
| EGFR.17 | DIQMTQSPSSLSASVGDRVTITCQASQDISNYLNWYQQKPGKAPKLLIYDASNLET GVPSRFSGSGSGTDFTFTISSLQPEDTATYFCOHFDHLPLAFGGGTKVEIKGATPPET GAETESPGETTGGSAESEPPGEGQVQLQESGPGAVKPSQTLSLTCTVSGGSVSSGD YYWTWIRQRPGKGLEWIGHIYYSGNTNYNPSLKSRLTISIDTSKTQFSLKLSSVTAAD TATYYCVRDRVTGAFDIWGQGTTVTVSS | 41 |
| EGFR.18 | DIQMTQSPSSLSASVGDRVTITCQASQDISNYLNWYQQKPGKAPKLLIYDASNLET GVPSRFSGSGSGTDFTFTISRLQPEDIATYFCQHFDHLPLAFGGGTKVEIKGATPPET GAETESPGETTGGSAESEPPGEGQVQLQESGPGAVKPSETLSLTCTVSGGSVSSGD YYWTWIRQSPGKGLEWIGHIYYSGNTNYNPSLKSRLTISIDTSKTQFSLKLSSVTAAD TATYYCVRDRVTGAFDIWGQGTAVTVSS | 42 |
| EGFR.19 | DIQMTQSPSSLSASVGDRVTITCQASQDISNYLNWYQQKPGKAPKLLIYDASNLET GVPSRFSGSGSGTDFTFTISRLQPEDIATYFCQHFDHLPLAFGGGTKVEIKGATPPET GAETESPGETTGGSAESEPPGEGQVQLQESGPGAVKPSETLSLTCTVSGGSVSSGD YYWTWIRQSPGKGLEWIGHIYYSGNTNYNPSLKSRLTISIDTSKTQFSLKLSSVTAAD TATYYCVRDRVTGAFDIWGQGTTVTVSS | 43 |
| EGFR.20 | DIQMTQSPSSLSASVGDRVTITCQASQDISNYLNWYQQKPGKAPKLLIYDASNLET GVPSRFSGSGSGTDFTFTISRLQPEDIATYFCQHFDHLPLAFGGGTKVEIKGATPPET GAETESPGETTGGSAESEPPGEGQVQLQESGPGLVKPSQTLSLTCTVSGGSVSSGD YYWTWIRQRPGKGLEWIGHIYYSGNTNYNPSLKSRLTISIDTSKTQFSLKLSSVTAAD TAIYYCVRDRVTGAFDIWGQGTMVTVSS | 44 |
| EGFR.21 | DIQMTQSPSSLSASVGDRVTITCQASQDISNYLNWYQQKPGKAPKLLIYDASNLET GVPSRFSGSGSGTDFTFTISRLQPEDIATYFCQHFDHLPLAFGGGTKVEIKGATPPET GAETESPGETTGGSAESEPPGEGQVQLQESGPGAVKPSQTLSLTCTVSGGSVSSGD YYWTWIRQRPGKGLEWIGHIYYSGNTNYNPSLKSRLTISIDTSKTQFSLKLSSVTAAD TATYYCVRDRVTGAFDIWGQGTAVTVSS | 45 |
| EGFR.22 | DIQMTQSPSSLSASVGDRVTITCQASQDISNYLNWYQQKPGKAPKLLIYDASNLET GVPSRFSGSGSGTDFTFTISRLQPEDIATYFCQHFDHLPLAFGGGTKVEIKGATPPET GAETESPGETTGGSAESEPPGEGQVQLQESGPGAVKPSQTLSLTCTVSGGSVSSGD YYWTWIRQRPGKGLEWIGHIYYSGNTNYNPSLKSRLTISIDTSKTQFSLKLSSVTAAD TATYYCVRDRVTGAFDIWGQGTTVTVSS | 46 |
| EGFR.23 | DIQMTQSPSSLSASVGDRVTITCQASQDISNYLNWYQQKPGKAPKLLIYDASNLET GVPSRFSGSGSGTDFTFTISRLQPEDTATYFCQHFDHLPLAFGGGTKVEIKGATPPE TGAETESPGETTGGSAESEPPGEGQVQLQESGPGAVKPSETLSLTCTVSGGSVSSG DYYWTWIRQSPGKGLEWIGHIYYSGNTNYNPSLKSRLTISIDTSKTQFSLKLSSVRAA DTATYYCVRDRVTGAFDIWGQGTAVTVSS | 47 |
| EGFR.24 | DIQMTQSPSSLSASVGDRVTITCQASQDISNYLNWYQQKPGKAPKLLIYDASNLET GVPSRFSGSGSGTDFTFTISRLQPEDTATYFCQHFDHLPLAFGGGTKVEIKGATPPE TGAETESPGETTGGSAESEPPGEGQVQLQESGPGAVKPSETLSLTCTVSGGSVSSG DYYWTWIRQSPGKGLEWIGHIYYSGNTNYNPSLKSRLTISIDTSKTQFSLKLSSVRAA DTATYYCVRDRVTGAFDIWGQGTTVTVSS | 48 |
| EGFR.25 | DIQMTQSPSSLSASVGDRVTITCQASQDISNYLNWYQQKPGKAPKLLIYDASNLET GVPSRFSGSGSGTDFTFTISRLQPEDTATYFCQHFDHLPLAFGGGTKVEIKGATPPE TGAETESPGETTGGSAESEPPGEGQVQLQESGPGLVKPSQTLSLTCTVSGGSVSSG DYYWTWIRQRPGKGLEWIGHIYYSGNTNYNPSLKSRLTISIDTSKTQFSLKLSSVTAA DTAIYYCVRDRVTGAFDIWGQGTMVTVSS | 49 |
| EGFR.26 | DIQMTQSPSSLSASVGDRVTITCQASQDISNYLNWYQQKPGKAPKLLIYDASNLET GVPSRFSGSGSGTDFTFTISRLQPEDTATYFCQHFDHLPLAFGGGTKVEIKGATPPE TGAETESPGETTGGSAESEPPGEGQVQLQESGPGAVKPSQTLSLTCTVSGGSVSSG DYYWTWIRQRPGKGLEWIGHIYYSGNTNYNPSLKSRLTISIDTSKTQFSLKLSSVTAA DTATYYCVRDRVTGAFDIWGQGTAVTVSS | 50 |
| EGFR.27 | DIQMTQSPSSLSASVGDRVTITCQASQDISNYLNWYQQKPGKAPKLLIYDASNLET GVPSRFSGSGSGTDFTFTISRLQPEDTATYFCQHFDHLPLAFGGGTKVEIKGATPPE TGAETESPGETTGGSAESEPPGEGQVQLQESGPGAVKPSQTLSLTCTVSGGSVSSG DYYWTWIRQRPGKGLEWIGHIYYSGNTNYNPSLKSRLTISIDTSKTQFSLKLSSVTAA DTATYYCVRDRVTGAFDIWGQGTTVTVSS | 51 |
| EGFR.2 | DIQMTQSPSSLSASVGDRVTITCQASQDISNYLNWYQQKPGKAPKLLIYDASNLET GVPSRFSGSGSGTDFTFTISSLQPEDIATYFCQHFDHLPLAFGGGTKVEIKGATPPET GAETESPGETTGGSAESEPPGEGQVQLQESGPGLVKPSETLSLTCTVSGGSVSSGD YYWTWIRQSPGKGLEWIGHIYYSGNTNYNPSLKSRLTISIDTSKTQFSLKLSSVTAAD TAIYYCVRDRVTGAFDIWGQGTMVTVSS | 52 |

### III). Release Segments

[0158] In another aspect, the disclosure relates to release segment (RS) peptides suitable for inclusion in the subject compositions described herein that are substrates for one or more mammalian proteases associated with or produced by disease tissues or cells found in proximity to disease tissues. Such proteases can include, but not be limited to the classes of proteases such as metalloproteinases, cysteine proteases, aspartate proteases, and serine proteases. The RS are useful for, amongst other things, conferring a prodrug format on the subject compositions that can be activated by the cleavage of the RS by mammalian proteases. As described herein, the RS are incorporated into the subject composition embodiments described herein, linking the incorporated antigen binding fragment to the XTEN (the configurations of which are described more fully, below) such that upon cleavage of the RS by action of the one or more proteases for which the RS are substrates, the antigen binding fragments and XTEN are released from the composition and the antigen binding fragments, no longer shielded by the XTEN, increase their binding potential to their respective ligands. In a particular feature, the RS serve as substrates for proteases found in close association with or are co-localized with disease tissues or cells, such as but not limited to tumors, cancer cells, and inflammatory tissues, and upon cleavage of the RS, the antigen binding fragments that are otherwise shielded by the XTEN of the subject compositions (and thus have a lower binding affinity for their respective ligands) are released from the composition and regain their increased potential to bind the target and/or effector cell ligands. In another embodiment, the RS of the subject polypeptide compositions comprise an amino acid sequence that is a substrate for a cellular protease located within a targeted cell. In another particular feature of the subject compositions described herein, the RS that are substrates for two or three classes of proteases were designed with sequences that are capable of being cleaved in different locations of the RS sequence by the different proteases, with a representative example depicted in FIG. 6. Thus, the RS that are substrates for two, three, or more classes of proteases have two, three, or a plurality of distinct cleavage sites in the RS sequence, but cleavage by a single protease nevertheless results in the release of the antigen binding fragments and the XTEN from the composition comprising the RS.

[0159] In one embodiment, the disclosure provides an activatable polypeptide comprising one or more release segments wherein the release segment is a substrate for cleavage by one or more mammalian proteases. In another embodiment, the present disclosure provides a polypeptide comprising a first release segment (RS1) sequence wherein the RS1 is a substrate for cleavage by a mammalian protease wherein the RS1 is a substrate for a protease selected from the group consisting of legumain, MMP-2, MMP-7, MMP-9, MMP-11, MMP-14, uPA, and matriptase. In other cases, the polypeptides of any of the subject composition embodiments described herein comprise a first release segment (RS1) sequence wherein the RS1 is a substrate for cleavage by one or more mammalian proteases selected from the group consisting of meprin, neprilysin (CD10), PSMA, BMP-1, A disintegrin and metalloproteinases (ADAMs), ADAM8, ADAM9, ADAM10, ADAM12, ADAM15, ADAM17 (TACE), ADAM19, ADAM28 (MDC-L), ADAM with thrombospondin motifs (ADAMTS), ADAMTS1, ADAMTS4, ADAMTS5, MMP-1 (collagenase 1), matrix metalloproteinase-1 (MMP-1), matrix metalloproteinase-2 (MMP-2, gelatinase A), matrix metalloproteinase-3 (MMP-3, stromelysin 1), matrix metalloproteinase-7 (MMP-7, Matrilysin 1), matrix metalloproteinase-8 (MMP-8, collagenase 2), matrix metalloproteinase-9 (MMP-9, gelatinase B), matrix metalloproteinase-10 (MMP-10, stromelysin 2), matrix metalloproteinase-11 (MMP-11, stromelysin 3), matrix metalloproteinase-12 (MMP-12, macrophage elastase), matrix metalloproteinase-13 (MMP-13, collagenase 3), matrix metalloproteinase-14 (MMP-14, MT1-MMP), matrix metalloproteinase-15 (MMP-15, MT2-MMP), matrix metalloproteinase-19 (MMP-19), matrix metalloproteinase-23 (MMP-23, CA-MMP), matrix metalloproteinase-24 (MMP-24, MT5-MMP), matrix metalloproteinase-26 (MMP-26, matrilysin 2), matrix metalloproteinase-27 (MMP-27, CMMP), legumain, cathepsin B, cathepsin C, cathepsin K, cathepsin L, cathepsin S, cathepsin X, cathepsin D, cathepsin E, secretase, urokinase (uPA), tissue-type plasminogen activator (tPA), plasmin, thrombin, prostate-specific antigen (PSA, KLK3), human neutrophil elastase (HNE), elastase, tryptase, Type II transmembrane serine proteases (TTSPs), DESC1, hepsin (HPN), matriptase, matriptase-2, TMPRSS2, TMPRSS3, TMPRSS4 (CAP2), fibroblast activation protein (FAP), kallikrein-related peptidase (KLK family), KLK4, KLK5, KLK6, KLK7, KLK8, KLK10, KLK11, KLK13, and KLK14.

[0160] In another embodiment, the present disclosure provides polypeptides comprising a first release segment (RS1) sequence for incorporation into the subject polypeptide compositions described herein wherein the RS1 is a substrate for cleavage by one or more mammalian proteases wherein the RS1 comprises an amino acid sequence having at least 90%, 91%, 92%, 93%, 94%, 95%, 96%, 97%, 98%, 99%, or 100% sequence identity to a sequence selected from SEQ ID NOS:53-671. In another embodiment, the RS1 comprises an amino acid sequence selected from the sequences of RSR-2089, RSR-2295, RSR-2298, RSR-2488, RSR-2599, RSR-2485, RSR-2486, RSR-2728, RSN-2089, RSN-2295, RSN-2298, RSN-2488, RSN-2599, RSN-2485, RSN-2486, RSN-2728, RSC-2089, RSC-2295, RSC-2298, RSC-2488, RSC-2599, RSC-2485, RSC-2486, and RSC-2728, each of which being forth in Table 5. As described more fully in descriptions of the configurations and properties of the subject polypeptide compositions, below, the release segment is fused between the antigen binding fragment and an XTEN polypeptide such that upon cleavage of the release segment, the XTEN is released from the composition.

[0161] In other embodiments, the disclosure provides polypeptides comprising a first release segment (RS1) sequence and a second release segment (RS2) for incorporation into the subject polypeptide compositions described herein wherein the RS1 and the RS2 are identical. In another embodiment, the present disclosure provides polypeptides comprising a first release segment (RS1) sequence and a second release segment (RS2) for incorporation into the subject polypeptide compositions wherein the RS1 and the RS2 are different. In some cases of the foregoing embodiments, theRS1 and the RS2 are each a substrate for cleavage by a mammalian protease selected from the group consisting of legumain, MMP-2, MMP-7, MMP-9, MMP-11, MMP-14, uPA, and matriptase. In another embodiment, the disclosure provides polypeptides comprising an RS1 and an RS2 sequence for incorporation into the subject polypeptide compositions described herein wherein the RS1 and RS2 are each a substrate for cleavage by one or more mammalian proteases wherein the RS1 and RS2 each comprise an amino acid sequence having at least 90%, 91%, 92%, 93%, 94%, 95%, 96%, 97%, 98%, 99%, or 100% sequence identity to a sequence selected from SEQ ID NOS:53-671. In another embodiment, the RS1 and RS2 each comprise an amino acid sequence selected from the sequences of RSR-2089, RSR-2295, RSR-2298, RSR-2488, RSR-2599, RSR-2485, RSR-2486, RSR-2728, RSN-2089, RSN-2295, RSN-2298, RSN-2488, RSN-2599, RSN-2485, RSN-2486, RSN-2728, RSC-2089, RSC-2295, RSC-2298, RSC-2488, RSC-2599, RSC-2485, RSC-2486, and RSC-2728, each of which being set forth in Table 5. As described more fully in paragraphs related to the descriptions of the configurations and properties of the subject polypeptide compositions, below, the release segments are fused between the antigen binding fragment and an XTEN polypeptide such that upon cleavage of each release segment, the adjoining XTEN is released from the composition.

TABLE 5

Release Segments and Amino Acid Sequences

| Name | Amino Acid Sequence | SEQ ID NO: |
|---|---|---|
| RSR-1517 | EAGRSANHEPLGLVAT | 53 |
| BSRS-A1 | ASGRSTNAGPSGLAGP | 54 |
| BSRS-A2 | ASGRSTNAGPQGLAGQ | 55 |
| BSRS-A3 | ASGRSTNAGPPGLTGP | 56 |
| VP-1 | ASSRGTNAGPAGLTGP | 57 |
| RSR-1752 | ASSRTTNTGPSTLTGP | 58 |
| RSR-1512 | AAGRSDNGTPLELVAP | 59 |
| RSR-1517 | EAGRSANHEPLGLVAT | 53 |
| VP-2 | ASGRGTNAGPAGLTGP | 60 |
| RSR-1018 | LFGRNDNHEPLELGGG | 61 |
| RSR-1053 | TAGRSDNLEPLGLVFG | 62 |
| RSR-1059 | LDGRSDNFHPPELVAG | 63 |
| RSR-1065 | LEGRSDNEEPENLVAG | 64 |
| RSR-1167 | LKGRSDNNAPLALVAG | 65 |
| RSR-1201 | VYSRGTNAGPHGLTGR | 66 |
| RSR-1218 | ANSRGTNKGFAGLIGP | 67 |
| RSR-1226 | ASSRLTNEAPAGLTIP | 68 |
| RSR-1254 | DQSRGTNAGPEGLTDP | 69 |
| RSR-1256 | ESSRGTNIGQGGLTGP | 70 |
| RSR-1261 | SSSRGTNQDPAGLTIP | 71 |
| RSR-1293 | ASSRGQNHSPMGLTGP | 72 |
| RSR-1309 | AYSRGPNAGPAGLEGR | 73 |
| RSR-1326 | ASERGNNAGPANLTGF | 74 |
| RSR-1345 | ASHRGTNPKPAILTGP | 75 |
| RSR-1354 | MSSRRTNANPAQLTGP | 76 |
| RSR-1426 | GAGRTDNHEPLELGAA | 77 |
| RSR-1478 | LAGRSENTAPLELTAG | 78 |
| RSR-1479 | LEGRPDNHEPLALVAS | 79 |
| RSR-1496 | LSGRSDNEEPLALPAG | 80 |
| RSR-1508 | EAGRTDNHEPLELSAP | 81 |
| RSR-1513 | EGGRSDNHGPLELVSG | 82 |
| RSR-1516 | LSGRSDNEAPLELEAG | 83 |
| RSR-1524 | LGGRADNHEPPELGAG | 84 |
| RSR-1622 | PPSRGTNAEPAGLTGE | 85 |
| RSR-1629 | ASTRGENAGPAGLEAP | 86 |
| RSR-1664 | ESSRGTNGAPEGLTGP | 87 |
| RSR-1667 | ASSRATNESPAGLTGE | 88 |
| RSR-1709 | ASSRGENPPPGGLTGP | 89 |
| RSR-1712 | AASRGTNTGPAELTGS | 90 |
| RSR-1727 | AGSRTTNAGPGGLEGP | 91 |
| RSR-1754 | APSRGENAGPATLTGA | 92 |
| RSR-1819 | ESGRAANTGPPTLTAP | 93 |
| RSR-1832 | NPGRAANEGPPGLPGS | 94 |
| RSR-1855 | ESSRAANLTPPELTGP | 95 |
| RSR-1911 | ASGRAANETPPGLTGA | 96 |
| RSR-1929 | NSGRGENLGAPGLTGT | 97 |
| RSR-1951 | TTGRAANLTPAGLTGP | 98 |
| RSR-2295 | EAGRSANHTPAGLTGP | 99 |
| RSR-2298 | ESGRAANTTPAGLTGP | 100 |
| RSR-2038 | TTGRATEAANLTPAGLTGP | 101 |
| RSR-2072 | TTGRAEEAANLTPAGLTGP | 102 |
| RSR-2089 | TTGRAGEAANLTPAGLTGP | 103 |
| RSR-2302 | TTGRATEAANATPAGLTGP | 104 |
| RSR-3047 | TTGRAGEAEGATSAGATGP | 105 |
| RSR-3052 | TTGEAGEAANATSAGATGP | 106 |
| RSR-3043 | TTGEAGEAAGLTPAGLTGP | 107 |
| RSR-3041 | TTGAAGEAANATPAGLTGP | 108 |
| RSR-3044 | TTGRAGEAAGLTPAGLTGP | 109 |
| RSR-3057 | TTGRAGEAANATSAGATGP | 110 |
| RSR-3058 | TTGEAGEAAGATSAGATGP | 111 |
| RSR-2485 | ESGRAANTEPPELGAG | 112 |
| RSR-2486 | ESGRAANTAPEGLTGP | 113 |
| RSR-2488 | EPGRAANHEPSGLTEG | 114 |
| RSR-2599 | ESGRAANHTGAPPGGLTGP | 115 |
| RSR-2706 | TTGRTGEGANATPGGLTGP | 116 |
| RSR-2707 | RTGRSGEAANETPEGLEGP | 117 |
| RSR-2708 | RTGRTGESANETPAGLGGP | 118 |
| RSR-2709 | STGRTGEPANETPAGLSGP | 119 |
| RSR-2710 | TTGRAGEPANATPTGLSGP | 120 |
| RSR-2711 | RTGRPGEGANATPTGLPGP | 121 |
| RSR-2712 | RTGRGGEAANATPSGLGGP | 122 |
| RSR-2713 | STGRSGESANATPGGLGGP | 123 |
| RSR-2714 | RTGRTGEEANATPAGLPGP | 124 |
| RSR-2715 | ATGRPGEPANTTPEGLEGP | 125 |
| RSR-2716 | STGRSGEPANATPGGLTGP | 126 |
| RSR-2717 | PTGRGGEGANTTPTGLPGP | 127 |
| RSR-2718 | PTGRSGEGANATPSGLTGP | 128 |
| RSR-2719 | TTGRASEGANSTPAPLTEP | 129 |
| RSR-2720 | TYGRAAEAANTTPAGLTAP | 130 |
| RSR-2721 | TTGRATEGANATPAELTEP | 131 |
| RSR-2722 | TVGRASEEANTTPASLTGP | 132 |
| RSR-2723 | TTGRAPEAANATPAPLTGP | 133 |
| RSR-2724 | TWGRATEPANATPAPLTSP | 134 |
| RSR-2725 | TVGRASESANATPAELTSP | 135 |
| RSR-2726 | TVGRAPEGANSTPAGLTGP | 136 |
| RSR-2727 | TWGRATEAPNLEPATLTTP | 137 |
| RSR-2728 | TTGRATEAPNLTPAPLTEP | 138 |
| RSR-2729 | TQGRATEAPNLSPAALTSP | 139 |
| RSR-2730 | TQGRAAEAPNLTPATLTAP | 140 |
| RSR-2731 | TSGRAPEATNLAPAPLTGP | 141 |
| RSR-2732 | TQGRAAEAANLTPAGLTEP | 142 |
| RSR-2733 | TTGRAGSAPNLPPTGLTTP | 143 |
| RSR-2734 | TTGRAGGAENLPPEGLTAP | 144 |
| RSR-2735 | TTSRAGTATNLTPEGLTAP | 145 |
| RSR-2736 | TTGRAGTATNLPPSGLTTP | 146 |
| RSR-2737 | TTARAGEAENLSPSGLTAP | 147 |
| RSR-2738 | TTGRAGGAGNLAPGGLTEP | 148 |
| RSR-2739 | TTGRAGTATNLPPEGLTGP | 149 |
| RSR-2740 | TTGRAGGAANLAPTGLTEP | 150 |
| RSR-2741 | TTGRAGTAENLAPSGLTTP | 151 |
| RSR-2742 | TTGRAGSATNLGPGGLTGP | 152 |
| RSR-2743 | TTARAGGAENLTPAGLTEP | 153 |
| RSR-2744 | TTARAGSAENLSPSGLTGP | 154 |
| RSR-2745 | TTARAGGAGNLAPEGLTTP | 155 |
| RSR-2746 | TTSRAGAAENLTPTGLTGP | 156 |
| RSR-2747 | TYGRTTTPGNEPPASLEAE | 157 |
| RSR-2748 | TYSRGESGPNEPPPGLTGP | 158 |
| RSR-2749 | AWGRTGASENETPAPLGGE | 159 |
| RSR-2750 | RWGRAETTPNTPPEGLETE | 160 |
| RSR-2751 | ESGRAANHTGAEPPELGAG | 161 |
| RSR-2754 | TTGRAGEAANLTPAGLTES | 162 |
| RSR-2755 | TTGRAGEAANLTPAALTES | 163 |
| RSR-2756 | TTGRAGEAANLTPAPLTES | 164 |
| RSR-2757 | TTGRAGEAANLTPEPLTES | 165 |
| RSR-2758 | TTGRAGEAANLTPAGLTGA | 166 |
| RSR-2759 | TTGRAGEAANLTPEGLTGA | 167 |
| RSR-2760 | TTGRAGEAANLTPEPLTGA | 168 |
| RSR-2761 | TTGRAGEAANLTPAGLTEA | 169 |
| RSR-2762 | TTGRAGEAANLTPEGLTEA | 170 |
| RSR-2763 | TTGRAGEAANLTPAPLTEA | 171 |
| RSR-2764 | TTGRAGEAANLTPEPLTEA | 172 |
| RSR-2765 | TTGRAGEAANLTPEPLTGP | 173 |
| RSR-2766 | TTGRAGEAANLTPAGLTGG | 174 |
| RSR-2767 | TTGRAGEAANLTPEGLTGG | 175 |
| RSR-2768 | TTGRAGEAANLTPEALTGG | 176 |
| RSR-2769 | TTGRAGEAANLTPEPLTGG | 177 |
| RSR-2770 | TTGRAGEAANLTPAGLTEG | 178 |
| RSR-2771 | TTGRAGEAANLTPEGLTEG | 179 |
| RSR-2772 | TTGRAGEAANLTPAPLTEG | 180 |
| RSR-2773 | TTGRAGEAANLTPEPLTEG | 181 |
| RSN-0001 | GSAPGSAGGYAELRMGGAIATSGSETPGT | 182 |
| RSN-0002 | GSAPGTGGGYAPLRMGGGAATSGSETPGT | 183 |
| RSN-0003 | GSAPGAEGGYAALRMGGEIATSGSETPGT | 184 |
| RSN-0004 | GSAPGGPGGYALLRMGGPAATSGSETPGT | 185 |
| RSN-0005 | GSAPGEAGGYAFLRMGGSIATSGSETPGT | 186 |
| RSN-0006 | GSAPGPGGGYASLRMGGTAATSGSETPGT | 187 |
| RSN-0007 | GSAPGSEGGYATLRMGGAIATSGSETPGT | 188 |
| RSN-0008 | GSAPGTPGGYANLRMGGGAATSGSETPGT | 189 |
| RSN-0009 | GSAPGASGGYAHLRMGGEIATSGSETPGT | 190 |
| RSN-0010 | GSAPGGTGGYGELRMGGPAATSGSETPGT | 191 |
| RSN-0011 | GSAPGEAGGYPELRMGGSIATSGSETPGT | 192 |
| RSN-0012 | GSAPGPGGGYVELRMGGTAATSGSETPGT | 193 |
| RSN-0013 | GSAPGSEGGYLELRMGGAIATSGSETPGT | 194 |
| RSN-0014 | GSAPGTPGGYSELRMGGGAATSGSETPGT | 195 |
| RSN-0015 | GSAPGASGGYTELRMGGEIATSGSETPGT | 196 |
| RSN-0016 | GSAPGGTGGYQELRMGGPAATSGSETPGT | 197 |
| RSN-0017 | GSAPGEAGGYEELRMGGSIATSGSETPGT | 198 |
| RSN-0018 | GSAPGPGIGPAELRMGGTAATSGSETPGT | 199 |
| RSN-0019 | GSAPGSEIGAAELRMGGAIATSGSETPGT | 200 |
| RSN-0020 | GSAPGTPIGSAELRMGGGAATSGSETPGT | 201 |
| RSN-0021 | GSAPGASIGTAELRMGGEIATSGSETPGT | 202 |
| RSN-0022 | GSAPGGTIGNAELRMGGPAATSGSETPGT | 203 |
| RSN-0023 | GSAPGEAIGQAELRMGGSIATSGSETPGT | 204 |
| RSN-0024 | GSAPGPGGPYAELRMGGTAATSGSETPGT | 205 |
| RSN-0025 | GSAPGSEGAYAELRMGGAIATSGSETPGT | 206 |
| RSN-0026 | GSAPGTPGVYAELRMGGGAATSGSETPGT | 207 |
| RSN-0027 | GSAPGASGLYAELRMGGEIATSGSETPGT | 208 |
| RSN-0028 | GSAPGGTGIYAELRMGGPAATSGSETPGT | 209 |
| RSN-0029 | GSAPGEAGFYAELRMGGSIATSGSETPGT | 210 |
| RSN-0030 | GSAPGPGGYYAELRMGGTAATSGSETPGT | 211 |
| RSN-0031 | GSAPGSEGSYAELRMGGAIATSGSETPGT | 212 |
| RSN-0032 | GSAPGTPGNYAELRMGGGAATSGSETPGT | 213 |
| RSN-0033 | GSAPGASGEYAELRMGGEIATSGSETPGT | 214 |
| RSN-0034 | GSAPGGTGHYAELRMGGPAATSGSETPGT | 215 |
| RSN-0035 | GSAPGEAGGYAEARMGGSIATSGSETPGT | 216 |
| RSN-0036 | GSAPGPGGGYAEVRMGGTAATSGSETPGT | 217 |
| RSN-0037 | GSAPGSEGGYAEIRMGGAIATSGSETPGT | 218 |
| RSN-0038 | GSAPGTPGGYAEFRMGGGAATSGSETPGT | 219 |
| RSN-0039 | GSAPGASGGYAEYRMGGEIATSGSETPGT | 220 |
| RSN-0040 | GSAPGGTGGYAESRMGGPAATSGSETPGT | 221 |
| RSN-0041 | GSAPGEAGGYAETRMGGSIATSGSETPGT | 222 |
| RSN-0042 | GSAPGPGGGYAELAMGGTRATSGSETPGT | 223 |
| RSN-0043 | GSAPGSEGGYAELVMGGARATSGSETPGT | 224 |
| RSN-0044 | GSAPGTPGGYAELLMGGGRATSGSETPGT | 225 |
| RSN-0045 | GSAPGASGGYAELIMGGERATSGSETPGT | 226 |
| RSN-0046 | GSAPGGTGGYAELWMGGPRATSGSETPGT | 227 |
| RSN-0047 | GSAPGEAGGYAELSMGGSRATSGSETPGT | 228 |
| RSN-0048 | GSAPGPGGGYAELTMGGTRATSGSETPGT | 229 |
| RSN-0049 | GSAPGSEGGYAELQMGGARATSGSETPGT | 230 |
| RSN-0050 | GSAPGTPGGYAELNMGGGRATSGSETPGT | 231 |
| RSN-0051 | GSAPGASGGYAELEMGGERATSGSETPGT | 232 |
| RSN-0052 | GSAPGGTGGYAELRPGGPIATSGSETPGT | 233 |
| RSN-0053 | GSAPGEAGGYAELRAGGSAATSGSETPGT | 234 |
| RSN-0054 | GSAPGPGGGYAELRLGGTIATSGSETPGT | 235 |
| RSN-0055 | GSAPGSEGGYAELRIGGAAATSGSETPGT | 236 |
| RSN-0056 | GSAPGTPGGYAELRSGGGIATSGSETPGT | 237 |
| RSN-0057 | GSAPGASGGYAELRNGGEAATSGSETPGT | 238 |
| RSN-0058 | GSAPGGTGGYAELRQGGPIATSGSETPGT | 239 |
| RSN-0059 | GSAPGEAGGYAELRDGGSAATSGSETPGT | 240 |
| RSN-0060 | GSAPGPGGGYAELREGGTIATSGSETPGT | 241 |
| RSN-0061 | GSAPGSEGGYAELRHGGAAATSGSETPGT | 242 |
| RSN-0062 | GSAPGTPGGYAELRMPGGIATSGSETPGT | 243 |
| RSN-0063 | GSAPGASGGYAELRMAGEAATSGSETPGT | 244 |
| RSN-0064 | GSAPGGTGGYAELRMVGPIATSGSETPGT | 245 |
| RSN-0065 | GSAPGEAGGYAELRMLGSAATSGSETPGT | 246 |
| RSN-0066 | GSAPGPGGGYAELRMIGTIATSGSETPGT | 247 |
| RSN-0067 | GSAPGSEGGYAELRMYGAIATSGSETPGT | 248 |
| RSN-0068 | GSAPGTPGGYAELRMSGGAATSGSETPGT | 249 |
| RSN-0069 | GSAPGASGGYAELRMNGEIATSGSETPGT | 250 |
| RSN-0070 | GSAPGGTGGYAELRMQGPAATSGSETPGT | 251 |
| RSN-0071 | GSAPGANHTPAGLTGPGARATSGSETPGT | 252 |
| RSN-0072 | GSAPGANTAPEGLTGPSTRATSGSETPGT | 253 |
| RSN-0073 | GSAPGTGAPPGGLTGPGTRATSGSETPGT | 254 |
| RSN-0074 | GSAPGANHEPSGLTEGSPRATSGSETPGT | 255 |
| RSN-0075 | GSAPGANTEPPELGAGTERATSGSETPGT | 256 |
| RSN-0076 | GSAPGASGPPPGLTGPPGRATSGSETPGT | 257 |
| RSN-0077 | GSAPGASGTPAPLGGEPGRATSGSETPGT | 258 |
| RSN-0078 | GSAPGPAGPPEGLETEAGRATSGSETPGT | 259 |
| RSN-0079 | GSAPGPTSGQGGLTGPESRATSGSETPGT | 260 |
| RSN-0080 | GSAPGSAGGAANLVRGGAIATSGSETPGT | 261 |
| RSN-0081 | GSAPGTGGGAAPLVRGGGAATSGSETPGT | 262 |
| RSN-0082 | GSAPGAEGGAAALVRGGEIATSGSETPGT | 263 |
| RSN-0083 | GSAPGGPGGAALLVRGGPAATSGSETPGT | 264 |
| RSN-0084 | GSAPGEAGGAAFLVRGGSIATSGSETPGT | 265 |
| RSN-0085 | GSAPGPGGGAASLVRGGTAATSGSETPGT | 266 |
| RSN-0086 | GSAPGSEGGAATLVRGGAIATSGSETPGT | 267 |
| RSN-0087 | GSAPGTPGGAAGLVRGGGAATSGSETPGT | 268 |
| RSN-0088 | GSAPGASGGAADLVRGGEIATSGSETPGT | 269 |
| RSN-0089 | GSAPGGTGGAGNLVRGGPAATSGSETPGT | 270 |
| RSN-0090 | GSAPGEAGGAPNLVRGGSIATSGSETPGT | 271 |
| RSN-0091 | GSAPGPGGGAVNLVRGGTAATSGSETPGT | 272 |
| RSN-0092 | GSAPGSEGGALNLVRGGAIATSGSETPGT | 273 |
| RSN-0093 | GSAPGTPGGASNLVRGGGAATSGSETPGT | 274 |
| RSN-0094 | GSAPGASGGATNLVRGGEIATSGSETPGT | 275 |
| RSN-0095 | GSAPGGTGGAQNLVRGGPAATSGSETPGT | 276 |
| RSN-0096 | GSAPGEAGGAENLVRGGSIATSGSETPGT | 277 |
| RSN-1517 | GSAPEAGRSANHEPLGLVATATSGSETPGT | 278 |
| BSRS-A1 | GSAPASGRSTNAGPSGLAGPATSGSETPGT | 279 |
| BSRS-A2 | GSAPASGRSTNAGPQGLAGQATSGSETPGT | 280 |
| BSRS-A3 | GSAPASGRSTNAGPPGLTGPATSGSETPGT | 281 |
| VP-1 | GSAPASSRGTNAGPAGLTGPATSGSETPGT | 282 |
| RSN-1752 | GSAPASSRTTNTGPSTLTGPATSGSETPGT | 283 |
| RSN-1512 | GSAPAAGRSDNGTPLELVAPATSGSETPGT | 284 |
| RSN-1517 | GSAPEAGRSANHEPLGLVATATSGSETPGT | 278 |
| VP-2 | GSAPASGRGTNAGPAGLTGPATSGSETPGT | 285 |
| RSN-1018 | GSAPLFGRNDNHEPLELGGGATSGSETPGT | 286 |
| RSN-1053 | GSAPTAGRSDNLEPLGLVFGATSGSETPGT | 287 |
| RSN-1059 | GSAPLDGRSDNFHPPELVAGATSGSETPGT | 288 |
| RSN-1065 | GSAPLEGRSDNEEPENLVAGATSGSETPGT | 289 |
| RSN-1167 | GSAPLKGRSDNNAPLALVAGATSGSETPGT | 290 |
| RSN-1201 | GSAPVYSRGTNAGPHGLTGRATSGSETPGT | 291 |
| RSN-1218 | GSAPANSRGTNKGFAGLIGPATSGSETPGT | 292 |
| RSN-1226 | GSAPASSRLTNEAPAGLTIPATSGSETPGT | 293 |
| RSN-1254 | GSAPDQSRGTNAGPEGLTDPATSGSETPGT | 294 |
| RSN-1256 | GSAPESSRGTNIGQGGLTGPATSGSETPGT | 295 |
| RSN-1261 | GSAPSSSRGTNQDPAGLTIPATSGSETPGT | 296 |
| RSN-1293 | GSAPASSRGQNHSPMGLTGPATSGSETPGT | 297 |
| RSN-1309 | GSAPAYSRGPNAGPAGLEGRATSGSETPGT | 298 |
| RSN-1326 | GSAPASERGNNAGPANLTGFATSGSETPGT | 299 |
| RSN-1345 | GSAPASHRGTNPKPAILTGPATSGSETPGT | 300 |
| RSN-1354 | GSAPMSSRRTNANPAQLTGPATSGSETPGT | 301 |
| RSN-1426 | GSAPGAGRTDNHEPLELGAAATSGSETPGT | 302 |
| RSN-1478 | GSAPLAGRSENTAPLELTAGATSGSETPGT | 303 |
| RSN-1479 | GSAPLEGRPDNHEPLALVASATSGSETPGT | 304 |
| RSN-1496 | GSAPLSGRSDNEEPLALPAGATSGSETPGT | 305 |
| RSN-1508 | GSAPEAGRTDNHEPLELSAPATSGSETPGT | 306 |
| RSN-1513 | GSAPEGGRSDNHGPLELVSGATSGSETPGT | 307 |
| RSN-1516 | GSAPLSGRSDNEAPLELEAGATSGSETPGT | 308 |
| RSN-1524 | GSAPLGGRADNHEPPELGAGATSGSETPGT | 309 |
| RSN-1622 | GSAPPPSRGTNAEPAGLTGEATSGSETPGT | 310 |
| RSN-1629 | GSAPASTRGENAGPAGLEAPATSGSETPGT | 311 |
| RSN-1664 | GSAPESSRGTNGAPEGLTGPATSGSETPGT | 312 |
| RSN-1667 | GSAPASSRATNESPAGLTGEATSGSETPGT | 313 |
| RSN-1709 | GSAPASSRGENPPPGGLTGPATSGSETPGT | 314 |
| RSN-1712 | GSAPAASRGTNTGPAELTGSATSGSETPGT | 315 |
| RSN-1727 | GSAPAGSRTTNAGPGGLEGPATSGSETPGT | 316 |
| RSN-1754 | GSAPAPSRGENAGPATLTGAATSGSETPGT | 317 |
| RSN-1819 | GSAPESGRAANTGPPTLTAPATSGSETPGT | 318 |
| RSN-1832 | GSAPNPGRAANEGPPGLPGSATSGSETPGT | 319 |
| RSN-1855 | GSAPESSRAANLTPPELTGPATSGSETPGT | 320 |
| RSN-1911 | GSAPASGRAANETPPGLTGAATSGSETPGT | 321 |
| RSN-1929 | GSAPNSGRGENLGAPGLTGTATSGSETPGT | 322 |
| RSN-1951 | GSAPTTGRAANLTPAGLTGPATSGSETPGT | 323 |
| RSN-2295 | GSAPEAGRSANHTPAGLTGPATSGSETPGT | 324 |
| RSN-2298 | GSAPESGRAANTTPAGLTGPATSGSETPGT | 325 |
| RSN-2038 | GSAPTTGRATEAANLTPAGLTGPATSGSETPGT | 326 |
| RSN-2072 | GSAPTTGRAEEAANLTPAGLTGPATSGSETPGT | 327 |
| RSN-2089 | GSAPTTGRAGEAANLTPAGLTGPATSGSETPGT | 328 |
| RSN-2302 | GSAPTTGRATEAANATPAGLTGPATSGSETPGT | 329 |
| RSN-3047 | GSAPTTGRAGEAEGATSAGATGPATSGSETPGT | 330 |
| RSN-3052 | GSAPTTGEAGEAANATSAGATGPATSGSETPGT | 331 |
| RSN-3043 | GSAPTTGEAGEAAGLTPAGLTGPATSGSETPGT | 332 |
| RSN-3041 | GSAPTTGAAGEAANATPAGLTGPATSGSETPGT | 333 |
| RSN-3044 | GSAPTTGRAGEAAGLTPAGLTGPATSGSETPGT | 334 |
| RSN-3057 | GSAPTTGRAGEAANATSAGATGPATSGSETPGT | 335 |
| RSN-3058 | GSAPTTGEAGEAAGATSAGATGPATSGSETPGT | 336 |
| RSN-2485 | GSAPESGRAANTEPPELGAGATSGSETPGT | 337 |
| RSN-2486 | GSAPESGRAANTAPEGLTGPATSGSETPGT | 338 |
| RSN-2488 | GSAPEPGRAANHEPSGLTEGATSGSETPGT | 339 |
| RSN-2599 | GSAPESGRAANHTGAPPGGLTGPATSGSETPGT | 340 |
| RSN-2706 | GSAPTTGRTGEGANATPGGLTGPATSGSETPGT | 341 |
| RSN-2707 | GSAPRTGRSGEAANETPEGLEGPATSGSETPGT | 342 |
| RSN-2708 | GSAPRTGRTGESANETPAGLGGPATSGSETPGT | 343 |
| RSN-2709 | GSAPSTGRTGEPANETPAGLSGPATSGSETPGT | 344 |
| RSN-2710 | GSAPTTGRAGEPANATPTGLSGPATSGSETPGT | 345 |
| RSN-2711 | GSAPRTGRPGEGANATPTGLPGPATSGSETPGT | 346 |
| RSN-2712 | GSAPRTGRGGEAANATPSGLGGPATSGSETPGT | 347 |
| RSN-2713 | GSAPSTGRSGESANATPGGLGGPATSGSETPGT | 348 |
| RSN-2714 | GSAPRTGRTGEEANATPAGLPGPATSGSETPGT | 349 |
| RSN-2715 | GSAPATGRPGEPANTTPEGLEGPATSGSETPGT | 350 |
| RSN-2716 | GSAPSTGRSGEPANATPGGLTGPATSGSETPGT | 351 |
| RSN-2717 | GSAPPTGRGGEGANTTPTGLPGPATSGSETPGT | 352 |
| RSN-2718 | GSAPPTGRSGEGANATPSGLTGPATSGSETPGT | 353 |
| RSN-2719 | GSAPTTGRASEGANSTPAPLTEPATSGSETPGT | 354 |
| RSN-2720 | GSAPTYGRAAEAANTTPAGLTAPATSGSETPGT | 355 |
| RSN-2721 | GSAPTTGRATEGANATPAELTEPATSGSETPGT | 356 |
| RSN-2722 | GSAPTVGRASEEANTTPASLTGPATSGSETPGT | 357 |
| RSN-2723 | GSAPTTGRAPEAANATPAPLTGPATSGSETPGT | 358 |
| RSN-2724 | GSAPTWGRATEPANATPAPLTSPATSGSETPGT | 359 |
| RSN-2725 | GSAPTVGRASESANATPAELTSPATSGSETPGT | 360 |
| RSN-2726 | GSAPTVGRAPEGANSTPAGLTGPATSGSETPGT | 361 |
| RSN-2727 | GSAPTWGRATEAPNLEPATLTTPATSGSETPGT | 362 |
| RSN-2728 | GSAPTTGRATEAPNLTPAPLTEPATSGSETPGT | 363 |
| RSN-2729 | GSAPTQGRATEAPNLSPAALTSPATSGSETPGT | 364 |
| RSN-2730 | GSAPTQGRAAEAPNLTPATLTAPATSGSETPGT | 365 |
| RSN-2731 | GSAPTSGRAPEATNLAPAPLTGPATSGSETPGT | 366 |
| RSN-2732 | GSAPTQGRAAEAANLTPAGLTEPATSGSETPGT | 367 |
| RSN-2733 | GSAPTTGRAGSAPNLPPTGLTTPATSGSETPGT | 368 |
| RSN-2734 | GSAPTTGRAGGAENLPPEGLTAPATSGSETPGT | 369 |
| RSN-2735 | GSAPTTSRAGTATNLTPEGLTAPATSGSETPGT | 370 |
| RSN-2736 | GSAPTTGRAGTATNLPPSGLTTPATSGSETPGT | 371 |
| RSN-2737 | GSAPTTARAGEAENLSPSGLTAPATSGSETPGT | 372 |
| RSN-2738 | GSAPTTGRAGGAGNLAPGGLTEPATSGSETPGT | 373 |
| RSN-2739 | GSAPTTGRAGTATNLPPEGLTGPATSGSETPGT | 374 |
| RSN-2740 | GSAPTTGRAGGAANLAPTGLTEPATSGSETPGT | 375 |
| RSN-2741 | GSAPTTGRAGTAENLAPSGLTTPATSGSETPGT | 376 |
| RSN-2742 | GSAPTTGRAGSATNLGPGGLTGPATSGSETPGT | 377 |
| RSN-2743 | GSAPTTARAGGAENLTPAGLTEPATSGSETPGT | 378 |
| RSN-2744 | GSAPTTARAGSAENLSPSGLTGPATSGSETPGT | 379 |
| RSN-2745 | GSAPTTARAGGAGNLAPEGLTTPATSGSETPGT | 380 |
| RSN-2746 | GSAPTTSRAGAAENLTPTGLTGPATSGSETPGT | 381 |
| RSN-2747 | GSAPTYGRTTTPGNEPPASLEAEATSGSETPGT | 382 |
| RSN-2748 | GSAPTYSRGESGPNEPPPGLTGPATSGSETPGT | 383 |
| RSN-2749 | GSAPAWGRTGASENETPAPLGGEATSGSETPGT | 384 |
| RSN-2750 | GSAPRWGRAETTPNTPPEGLETEATSGSETPGT | 385 |
| RSN-2751 | GSAPESGRAANHTGAEPPELGAGATSGSETPGT | 386 |
| RSN-2754 | GSAPTTGRAGEAANLTPAGLTESATSGSETPGT | 387 |
| RSN-2755 | GSAPTTGRAGEAANLTPAALTESATSGSETPGT | 388 |
| RSN-2756 | GSAPTTGRAGEAANLTPAPLTESATSGSETPGT | 389 |
| RSN-2757 | GSAPTTGRAGEAANLTPEPLTESATSGSETPGT | 390 |
| RSN-2758 | GSAPTTGRAGEAANLTPAGLTGAATSGSETPGT | 391 |
| RSN-2759 | GSAPTTGRAGEAANLTPEGLTGAATSGSETPGT | 392 |
| RSN-2760 | GSAPTTGRAGEAANLTPEPLTGAATSGSETPGT | 393 |
| RSN-2761 | GSAPTTGRAGEAANLTPAGLTEAATSGSETPGT | 394 |
| RSN-2762 | GSAPTTGRAGEAANLTPEGLTEAATSGSETPGT | 395 |
| RSN-2763 | GSAPTTGRAGEAANLTPAPLTEAATSGSETPGT | 396 |
| RSN-2764 | GSAPTTGRAGEAANLTPEPLTEAATSGSETPGT | 397 |
| RSN-2765 | GSAPTTGRAGEAANLTPEPLTGPATSGSETPGT | 398 |
| RSN-2766 | GSAPTTGRAGEAANLTPAGLTGGATSGSETPGT | 399 |
| RSN-2767 | GSAPTTGRAGEAANLTPEGLTGGATSGSETPGT | 400 |
| RSN-2768 | GSAPTTGRAGEAANLTPEALTGGATSGSETPGT | 401 |
| RSN-2769 | GSAPTTGRAGEAANLTPEPLTGGATSGSETPGT | 402 |
| RSN-2770 | GSAPTTGRAGEAANLTPAGLTEGATSGSETPGT | 403 |
| RSN-2771 | GSAPTTGRAGEAANLTPEGLTEGATSGSETPGT | 404 |
| RSN-2772 | GSAPTTGRAGEAANLTPAPLTEGATSGSETPGT | 405 |
| RSN-2773 | GSAPTTGRAGEAANLTPEPLTEGATSGSETPGT | 406 |
| RSN-3047 | GSAPTTGRAGEAEGATSAGATGPATSGSETPGT | 330 |
| RSN-2783 | GSAPEAGRSAEATSAGATGPATSGSETPGT | 407 |
| RSN-3107 | GSAPSASGTYSRGESGPGSPATSGSETPGT | 408 |
| RSN-3103 | GSAPSASGEAGRTDTHPGSPATSGSETPGT | 409 |
| RSN-3102 | GSAPSASGEPGRAAEHPGSPATSGSETPGT | 410 |
| RSN-3119 | GSAPSPAGESSRGTTIAGSPATSGSETPGT | 411 |
| RSN-3043 | GSAPTTGEAGEAAGLTPAGLTGPATSGSETPGT | 332 |
| RSN-2789 | GSAPEAGESAGATPAGLTGPATSGSETPGT | 412 |
| RSN-3109 | GSAPSASGAPLELEAGPGSPATSGSETPGT | 413 |
| RSN-3110 | GSAPSASGEPPELGAGPGSPATSGSETPGT | 414 |
| RSN-3111 | GSAPSASGEPSGLTEGPGSPATSGSETPGT | 415 |
| RSN-3112 | GSAPSASGTPAPLTEPPGSPATSGSETPGT | 416 |
| RSN-3113 | GSAPSASGTPAELTEPPGSPATSGSETPGT | 417 |
| RSN-3114 | GSAPSASGPPPGLTGPPGSPATSGSETPGT | 418 |
| RSN-3115 | GSAPSASGTPAPLGGEPGSPATSGSETPGT | 419 |
| RSN-3125 | GSAPSPAGAPEGLTGPAGSPATSGSETPGT | 420 |
| RSN-3126 | GSAPSPAGPPEGLETEAGSPATSGSETPGT | 421 |
| RSN-3127 | GSAPSPTSGQGGLTGPGSEPATSGSETPGT | 422 |
| RSN-3131 | GSAPSESAPPEGLETESTEPATSGSETPGT | 423 |
| RSN-3132 | GSAPSEGSEPLELGAASETPATSGSETPGT | 424 |
| RSN-3133 | GSAPSEGSGPAGLEAPSETPATSGSETPGT | 425 |
| RSN-3138 | GSAPSEPTPPASLEAEPGSPATSGSETPGT | 426 |
| RSC-0001 | GTAEAASASGGSAGGYAELRMGGAIPGSP | 427 |
| RSC-0002 | GTAEAASASGGTGGGYAPLRMGGGAPGSP | 428 |
| RSC-0003 | GTAEAASASGGAEGGYAALRMGGEIPGSP | 429 |
| RSC-0004 | GTAEAASASGGGPGGYALLRMGGPAPGSP | 430 |
| RSC-0005 | GTAEAASASGGEAGGYAFLRMGGSIPGSP | 431 |
| RSC-0006 | GTAEAASASGGPGGGYASLRMGGTAPGSP | 432 |
| RSC-0007 | GTAEAASASGGSEGGYATLRMGGAIPGSP | 433 |
| RSC-0008 | GTAEAASASGGTPGGYANLRMGGGAPGSP | 434 |
| RSC-0009 | GTAEAASASGGASGGYAHLRMGGEIPGSP | 435 |
| RSC-0010 | GTAEAASASGGGTGGYGELRMGGPAPGSP | 436 |
| RSC-0011 | GTAEAASASGGEAGGYPELRMGGSIPGSP | 437 |
| RSC-0012 | GTAEAASASGGPGGGYVELRMGGTAPGSP | 438 |
| RSC-0013 | GTAEAASASGGSEGGYLELRMGGAIPGSP | 439 |
| RSC-0014 | GTAEAASASGGTPGGYSELRMGGGAPGSP | 440 |
| RSC-0015 | GTAEAASASGGASGGYTELRMGGEIPGSP | 441 |
| RSC-0016 | GTAEAASASGGGTGGYQELRMGGPAPGSP | 442 |
| RSC-0017 | GTAEAASASGGEAGGYEELRMGGSIPGSP | 443 |
| RSC-0018 | GTAEAASASGGPGIGPAELRMGGTAPGSP | 444 |
| RSC-0019 | GTAEAASASGGSEIGAAELRMGGAIPGSP | 445 |
| RSC-0020 | GTAEAASASGGTPIGSAELRMGGGAPGSP | 446 |
| RSC-0021 | GTAEAASASGGASIGTAELRMGGEIPGSP | 447 |
| RSC-0022 | GTAEAASASGGGTIGNAELRMGGPAPGSP | 448 |
| RSC-0023 | GTAEAASASGGEAIGQAELRMGGSIPGSP | 449 |
| RSC-0024 | GTAEAASASGGPGGPYAELRMGGTAPGSP | 450 |
| RSC-0025 | GTAEAASASGGSEGAYAELRMGGAIPGSP | 451 |
| RSC-0026 | GTAEAASASGGTPGVYAELRMGGGAPGSP | 452 |
| RSC-0027 | GTAEAASASGGASGLYAELRMGGEIPGSP | 453 |
| RSC-0028 | GTAEAASASGGGTGIYAELRMGGPAPGSP | 454 |
| RSC-0029 | GTAEAASASGGEAGFYAELRMGGSIPGSP | 455 |
| RSC-0030 | GTAEAASASGGPGGYYAELRMGGTAPGSP | 456 |
| RSC-0031 | GTAEAASASGGSEGSYAELRMGGAIPGSP | 457 |
| RSC-0032 | GTAEAASASGGTPGNYAELRMGGGAPGSP | 458 |
| RSC-0033 | GTAEAASASGGASGEYAELRMGGEIPGSP | 459 |
| RSC-0034 | GTAEAASASGGGTGHYAELRMGGPAPGSP | 460 |
| RSC-0035 | GTAEAASASGGEAGGYAEARMGGSIPGSP | 461 |
| RSC-0036 | GTAEAASASGGPGGGYAEVRMGGTAPGSP | 462 |
| RSC-0037 | GTAEAASASGGSEGGYAEIRMGGAIPGSP | 463 |
| RSC-0038 | GTAEAASASGGTPGGYAEFRMGGGAPGSP | 464 |
| RSC-0039 | GTAEAASASGGASGGYAEYRMGGEIPGSP | 465 |
| RSC-0040 | GTAEAASASGGGTGGYAESRMGGPAPGSP | 466 |
| RSC-0041 | GTAEAASASGGEAGGYAETRMGGSIPGSP | 467 |
| RSC-0042 | GTAEAASASGGPGGGYAELAMGGTRPGSP | 468 |
| RSC-0043 | GTAEAASASGGSEGGYAELVMGGARPGSP | 469 |
| RSC-0044 | GTAEAASASGGTPGGYAELLMGGGRPGSP | 470 |
| RSC-0045 | GTAEAASASGGASGGYAELIMGGERPGSP | 471 |
| RSC-0046 | GTAEAASASGGGTGGYAELWMGGPRPGSP | 472 |
| RSC-0047 | GTAEAASASGGEAGGYAELSMGGSRPGSP | 473 |
| RSC-0048 | GTAEAASASGGPGGGYAELTMGGTRPGSP | 474 |
| RSC-0049 | GTAEAASASGGSEGGYAELQMGGARPGSP | 475 |
| RSC-0050 | GTAEAASASGGTPGGYAELNMGGGRPGSP | 476 |
| RSC-0051 | GTAEAASASGGASGGYAELEMGGERPGSP | 477 |
| RSC-0052 | GTAEAASASGGGTGGYAELRPGGPIPGSP | 478 |
| RSC-0053 | GTAEAASASGGEAGGYAELRAGGSAPGSP | 479 |
| RSC-0054 | GTAEAASASGGPGGGYAELRLGGTIPGSP | 480 |
| RSC-0055 | GTAEAASASGGSEGGYAELRIGGAAPGSP | 481 |
| RSC-0056 | GTAEAASASGGTPGGYAELRSGGGIPGSP | 482 |
| RSC-0057 | GTAEAASASGGASGGYAELRNGGEAPGSP | 483 |
| RSC-0058 | GTAEAASASGGGTGGYAELRQGGPIPGSP | 484 |
| RSC-0059 | GTAEAASASGGEAGGYAELRDGGSAPGSP | 485 |
| RSC-0060 | GTAEAASASGGPGGGYAELREGGTIPGSP | 486 |
| RSC-0061 | GTAEAASASGGSEGGYAELRHGGAAPGSP | 487 |
| RSC-0062 | GTAEAASASGGTPGGYAELRMPGGIPGSP | 488 |
| RSC-0063 | GTAEAASASGGASGGYAELRMAGEAPGSP | 489 |
| RSC-0064 | GTAEAASASGGGTGGYAELRMVGPIPGSP | 490 |
| RSC-0065 | GTAEAASASGGEAGGYAELRMLGSAPGSP | 491 |
| RSC-0066 | GTAEAASASGGPGGGYAELRMIGTIPGSP | 492 |
| RSC-0067 | GTAEAASASGGSEGGYAELRMYGAIPGSP | 493 |
| RSC-0068 | GTAEAASASGGTPGGYAELRMSGGAPGSP | 494 |
| RSC-0069 | GTAEAASASGGASGGYAELRMNGEIPGSP | 495 |
| RSC-0070 | GTAEAASASGGGTGGYAELRMQGPAPGSP | 496 |
| RSC-0071 | GTAEAASASGGANHTPAGLTGPGARPGSP | 497 |
| RSC-0072 | GTAEAASASGGANTAPEGLTGPSTRPGSP | 498 |
| RSC-0073 | GTAEAASASGGTGAPPGGLTGPGTRPGSP | 499 |
| RSC-0074 | GTAEAASASGGANHEPSGLTEGSPRPGSP | 500 |
| RSC-0075 | GTAEAASASGGANTEPPELGAGTERPGSP | 501 |
| RSC-0076 | GTAEAASASGGASGPPPGLTGPPGRPGSP | 502 |
| RSC-0077 | GTAEAASASGGASGTPAPLGGEPGRPGSP | 503 |
| RSC-0078 | GTAEAASASGGPAGPPEGLETEAGRPGSP | 504 |
| RSC-0079 | GTAEAASASGGPTSGQGGLTGPESRPGSP | 505 |
| RSC-0080 | GTAEAASASGGSAGGAANLVRGGAIPGSP | 506 |
| RSC-0081 | GTAEAASASGGTGGGAAPLVRGGGAPGSP | 507 |
| RSC-0082 | GTAEAASASGGAEGGAAALVRGGEIPGSP | 508 |
| RSC-0083 | GTAEAASASGGGPGGAALLVRGGPAPGSP | 509 |
| RSC-0084 | GTAEAASASGGEAGGAAFLVRGGSIPGSP | 510 |
| RSC-0085 | GTAEAASASGGPGGGAASLVRGGTAPGSP | 511 |
| RSC-0086 | GTAEAASASGGSEGGAATLVRGGAIPGSP | 512 |
| RSC-0087 | GTAEAASASGGTPGGAAGLVRGGGAPGSP | 513 |
| RSC-0088 | GTAEAASASGGASGGAADLVRGGEIPGSP | 514 |
| RSC-0089 | GTAEAASASGGGTGGAGNLVRGGPAPGSP | 515 |
| RSC-0090 | GTAEAASASGGEAGGAPNLVRGGSIPGSP | 516 |
| RSC-0091 | GTAEAASASGGPGGGAVNLVRGGTAPGSP | 517 |
| RSC-0092 | GTAEAASASGGSEGGALNLVRGGAIPGSP | 518 |
| RSC-0093 | GTAEAASASGGTPGGASNLVRGGGAPGSP | 519 |
| RSC-0094 | GTAEAASASGGASGGATNLVRGGEIPGSP | 520 |
| RSC-0095 | GTAEAASASGGGTGGAQNLVRGGPAPGSP | 521 |
| RSC-0096 | GTAEAASASGGEAGGAENLVRGGSIPGSP | 522 |
| RSC-1517 | GTAEAASASGEAGRSANHEPLGLVATPGSP | 523 |
| BSRS-A1 | GTAEAASASGASGRSTNAGPSGLAGPPGSP | 524 |
| BSRS-A2 | GTAEAASASGASGRSTNAGPQGLAGQPGSP | 525 |
| BSRS-A3 | GTAEAASASGASGRSTNAGPPGLTGPPGSP | 526 |
| VP-1 | GTAEAASASGASSRGTNAGPAGLTGPPGSP | 527 |
| RSC-1752 | GTAEAASASGASSRTTNTGPSTLTGPPGSP | 528 |
| RSC-1512 | GTAEAASASGAAGRSDNGTPLELVAPPGSP | 529 |
| RSC-1517 | GTAEAASASGEAGRSANHEPLGLVATPGSP | 523 |
| VP-2 | GTAEAASASGASGRGTNAGPAGLTGPPGSP | 530 |
| RSC-1018 | GTAEAASASGLFGRNDNHEPLELGGGPGSP | 531 |
| RSC-1053 | GTAEAASASGTAGRSDNLEPLGLVFGPGSP | 532 |
| RSC-1059 | GTAEAASASGLDGRSDNFHPPELVAGPGSP | 533 |
| RSC-1065 | GTAEAASASGLEGRSDNEEPENLVAGPGSP | 534 |
| RSC-1167 | GTAEAASASGLKGRSDNNAPLALVAGPGSP | 535 |
| RSC-1201 | GTAEAASASGVYSRGTNAGPHGLTGRPGSP | 536 |
| RSC-1218 | GTAEAASASGANSRGTNKGFAGLIGPPGSP | 537 |
| RSC-1226 | GTAEAASASGASSRLTNEAPAGLTIPPGSP | 538 |
| RSC-1254 | GTAEAASASGDQSRGTNAGPEGLTDPPGSP | 539 |
| RSC-1256 | GTAEAASASGESSRGTNIGQGGLTGPPGSP | 540 |
| RSC-1261 | GTAEAASASGSSSRGTNQDPAGLTIPPGSP | 541 |
| RSC-1293 | GTAEAASASGASSRGQNHSPMGLTGPPGSP | 542 |
| RSC-1309 | GTAEAASASGAYSRGPNAGPAGLEGRPGSP | 543 |
| RSC-1326 | GTAEAASASGASERGNNAGPANLTGFPGSP | 544 |
| RSC-1345 | GTAEAASASGASHRGTNPKPAILTGPPGSP | 545 |
| RSC-1354 | GTAEAASASGMSSRRTNANPAQLTGPPGSP | 546 |
| RSC-1426 | GTAEAASASGGAGRTDNHEPLELGAAPGSP | 547 |
| RSC-1478 | GTAEAASASGLAGRSENTAPLELTAGPGSP | 548 |
| RSC-1479 | GTAEAASASGLEGRPDNHEPLALVASPGSP | 549 |
| RSC-1496 | GTAEAASASGLSGRSDNEEPLALPAGPGSP | 550 |
| RSC-1508 | GTAEAASASGEAGRTDNHEPLELSAPPGSP | 551 |
| RSC-1513 | GTAEAASASGEGGRSDNHGPLELVSGPGSP | 552 |
| RSC-1516 | GTAEAASASGLSGRSDNEAPLELEAGPGSP | 553 |
| RSC-1524 | GTAEAASASGLGGRADNHEPPELGAGPGSP | 554 |
| RSC-1622 | GTAEAASASGPPSRGTNAEPAGLTGEPGSP | 555 |
| RSC-1629 | GTAEAASASGASTRGENAGPAGLEAPPGSP | 556 |
| RSC-1664 | GTAEAASASGESSRGTNGAPEGLTGPPGSP | 557 |
| RSC-1667 | GTAEAASASGASSRATNESPAGLTGEPGSP | 558 |
| RSC-1709 | GTAEAASASGASSRGENPPPGGLTGPPGSP | 559 |
| RSC-1712 | GTAEAASASGAASRGTNTGPAELTGSPGSP | 560 |
| RSC-1727 | GTAEAASASGAGSRTTNAGPGGLEGPPGSP | 561 |
| RSC-1754 | GTAEAASASGAPSRGENAGPATLTGAPGSP | 562 |
| RSC-1819 | GTAEAASASGESGRAANTGPPTLTAPPGSP | 563 |
| RSC-1832 | GTAEAASASGNPGRAANEGPPGLPGSPGSP | 564 |
| RSC-1855 | GTAEAASASGESSRAANLTPPELTGPPGSP | 565 |
| RSC-1911 | GTAEAASASGASGRAANETPPGLTGAPGSP | 566 |
| RSC-1929 | GTAEAASASGNSGRGENLGAPGLTGTPGSP | 567 |
| RSC-1951 | GTAEAASASGTTGRAANLTPAGLTGPPGSP | 568 |
| RSC-2295 | GTAEAASASGEAGRSANHTPAGLTGPPGSP | 569 |
| RSC-2298 | GTAEAASASGESGRAANTTPAGLTGPPGSP | 570 |
| RSC-2038 | GTAEAASASGTTGRATEAANLTPAGLTGPPGSP | 571 |
| RSC-2072 | GTAEAASASGTTGRAEEAANLTPAGLTGPPGSP | 572 |
| RSC-2089 | GTAEAASASGTTGRAGEAANLTPAGLTGPPGSP | 573 |
| RSC-2302 | GTAEAASASGTTGRATEAANATPAGLTGPPGSP | 574 |
| RSC-3047 | GTAEAASASGTTGRAGEAEGATSAGATGPPGSP | 575 |
| RSC-3052 | GTAEAASASGTTGEAGEAANATSAGATGPPGSP | 576 |
| RSC-3043 | GTAEAASASGTTGEAGEAAGLTPAGLTGPPGSP | 577 |
| RSC-3041 | GTAEAASASGTTGAAGEAANATPAGLTGPPGSP | 578 |
| RSC-3044 | GTAEAASASGTTGRAGEAAGLTPAGLTGPPGSP | 579 |
| RSC-3057 | GTAEAASASGTTGRAGEAANATSAGATGPPGSP | 580 |
| RSC-3058 | GTAEAASASGTTGEAGEAAGATSAGATGPPGSP | 581 |
| RSC-2485 | GTAEAASASGESGRAANTEPPELGAGPGSP | 582 |
| RSC-2486 | GTAEAASASGESGRAANTAPEGLTGPPGSP | 583 |
| RSC-2488 | GTAEAASASGEPGRAANHEPSGLTEGPGSP | 584 |
| RSC-2599 | GTAEAASASGESGRAANHTGAPPGGLTGPPGSP | 585 |
| RSC-2706 | GTAEAASASGTTGRTGEGANATPGGLTGPPGSP | 586 |
| RSC-2707 | GTAEAASASGRTGRSGEAANETPEGLEGPPGSP | 587 |
| RSC-2708 | GTAEAASASGRTGRTGESANETPAGLGGPPGSP | 588 |
| RSC-2709 | GTAEAASASGSTGRTGEPANETPAGLSGPPGSP | 589 |
| RSC-2710 | GTAEAASASGTTGRAGEPANATPTGLSGPPGSP | 590 |
| RSC-2711 | GTAEAASASGRTGRPGEGANATPTGLPGPPGSP | 591 |
| RSC-2712 | GTAEAASASGRTGRGGEAANATPSGLGGPPGSP | 592 |
| RSC-2713 | GTAEAASASGSTGRSGESANATPGGLGGPPGSP | 593 |
| RSC-2714 | GTAEAASASGRTGRTGEEANATPAGLPGPPGSP | 594 |
| RSC-2715 | GTAEAASASGATGRPGEPANTTPEGLEGPPGSP | 595 |
| RSC-2716 | GTAEAASASGSTGRSGEPANATPGGLTGPPGSP | 596 |
| RSC-2717 | GTAEAASASGPTGRGGEGANTTPTGLPGPPGSP | 597 |
| RSC-2718 | GTAEAASASGPTGRSGEGANATPSGLTGPPGSP | 598 |
| RSC-2719 | GTAEAASASGTTGRASEGANSTPAPLTEPPGSP | 599 |
| RSC-2720 | GTAEAASASGTYGRAAEAANTTPAGLTAPPGSP | 600 |
| RSC-2721 | GTAEAASASGTTGRATEGANATPAELTEPPGSP | 601 |
| RSC-2722 | GTAEAASASGTVGRASEEANTTPASLTGPPGSP | 602 |
| RSC-2723 | GTAEAASASGTTGRAPEAANATPAPLTGPPGSP | 603 |
| RSC-2724 | GTAEAASASGTWGRATEPANATPAPLTSPPGSP | 604 |
| RSC-2725 | GTAEAASASGTVGRASESANATPAELTSPPGSP | 605 |
| RSC-2726 | GTAEAASASGTVGRAPEGANSTPAGLTGPPGSP | 606 |
| RSC-2727 | GTAEAASASGTWGRATEAPNLEPATLTTPPGSP | 607 |
| RSC-2728 | GTAEAASASGTTGRATEAPNLTPAPLTEPPGSP | 608 |
| RSC-2729 | GTAEAASASGTQGRATEAPNLSPAALTSPPGSP | 609 |
| RSC-2730 | GTAEAASASGTQGRAAEAPNLTPATLTAPPGSP | 610 |
| RSC-2731 | GTAEAASASGTSGRAPEATNLAPAPLTGPPGSP | 611 |
| RSC-2732 | GTAEAASASGTQGRAAEAANLTPAGLTEPPGSP | 612 |
| RSC-2733 | GTAEAASASGTTGRAGSAPNLPPTGLTTPPGSP | 613 |
| RSC-2734 | GTAEAASASGTTGRAGGAENLPPEGLTAPPGSP | 614 |
| RSC-2735 | GTAEAASASGTTSRAGTATNLTPEGLTAPPGSP | 615 |
| RSC-2736 | GTAEAASASGTTGRAGTATNLPPSGLTTPPGSP | 616 |
| RSC-2737 | GTAEAASASGTTARAGEAENLSPSGLTAPPGSP | 617 |
| RSC-2738 | GTAEAASASGTTGRAGGAGNLAPGGLTEPPGSP | 618 |
| RSC-2739 | GTAEAASASGTTGRAGTATNLPPEGLTGPPGSP | 619 |
| RSC-2740 | GTAEAASASGTTGRAGGAANLAPTGLTEPPGSP | 620 |
| RSC-2741 | GTAEAASASGTTGRAGTAENLAPSGLTTPPGSP | 621 |
| RSC-2742 | GTAEAASASGTTGRAGSATNLGPGGLTGPPGSP | 622 |
| RSC-2743 | GTAEAASASGTTARAGGAENLTPAGLTEPPGSP | 623 |
| RSC-2744 | GTAEAASASGTTARAGSAENLSPSGLTGPPGSP | 624 |
| RSC-2745 | GTAEAASASGTTARAGGAGNLAPEGLTTPPGSP | 625 |
| RSC-2746 | GTAEAASASGTTSRAGAAENLTPTGLTGPPGSP | 626 |
| RSC-2747 | GTAEAASASGTYGRTTTPGNEPPASLEAEPGSP | 627 |
| RSC-2748 | GTAEAASASGTYSRGESGPNEPPPGLTGPPGSP | 628 |
| RSC-2749 | GTAEAASASGAWGRTGASENETPAPLGGEPGSP | 629 |
| RSC-2750 | GTAEAASASGRWGRAETTPNTPPEGLETEPGSP | 630 |
| RSC-2751 | GTAEAASASGESGRAANHTGAEPPELGAGPGSP | 631 |
| RSC-2754 | GTAEAASASGTTGRAGEAANLTPAGLTESPGSP | 632 |
| RSC-2755 | GTAEAASASGTTGRAGEAANLTPAALTESPGSP | 633 |
| RSC-2756 | GTAEAASASGTTGRAGEAANLTPAPLTESPGSP | 634 |
| RSC-2757 | GTAEAASASGTTGRAGEAANLTPEPLTESPGSP | 635 |
| RSC-2758 | GTAEAASASGTTGRAGEAANLTPAGLTGAPGSP | 636 |
| RSC-2759 | GTAEAASASGTTGRAGEAANLTPEGLTGAPGSP | 637 |
| RSC-2760 | GTAEAASASGTTGRAGEAANLTPEPLTGAPGSP | 638 |
| RSC-2761 | GTAEAASASGTTGRAGEAANLTPAGLTEAPGSP | 639 |
| RSC-2762 | GTAEAASASGTTGRAGEAANLTPEGLTEAPGSP | 640 |
| RSC-2763 | GTAEAASASGTTGRAGEAANLTPAPLTEAPGSP | 641 |
| RSC-2764 | GTAEAASASGTTGRAGEAANLTPEPLTEAPGSP | 642 |
| RSC-2765 | GTAEAASASGTTGRAGEAANLTPEPLTGPPGSP | 643 |
| RSC-2766 | GTAEAASASGTTGRAGEAANLTPAGLTGGPGSP | 644 |
| RSC-2767 | GTAEAASASGTTGRAGEAANLTPEGLTGGPGSP | 645 |
| RSC-2768 | GTAEAASASGTTGRAGEAANLTPEALTGGPGSP | 646 |
| RSC-2769 | GTAEAASASGTTGRAGEAANLTPEPLTGGPGSP | 647 |
| RSC-2770 | GTAEAASASGTTGRAGEAANLTPAGLTEGPGSP | 648 |
| RSC-2771 | GTAEAASASGTTGRAGEAANLTPEGLTEGPGSP | 649 |
| RSC-2772 | GTAEAASASGTTGRAGEAANLTPAPLTEGPGSP | 650 |
| RSC-2773 | GTAEAASASGTTGRAGEAANLTPEPLTEGPGSP | 651 |
| RSC-3047 | GTAEAASASGTTGRAGEAEGATSAGATGPPGSP | 575 |
| RSC-2783 | GTAEAASASGEAGRSAEATSAGATGPPGSP | 652 |
| RSC-3107 | GTAEAASASGSASGTYSRGESGPGSPPGSP | 653 |
| RSC-3103 | GTAEAASASGSASGEAGRTDTHPGSPPGSP | 654 |
| RSC-3102 | GTAEAASASGSASGEPGRAAEHPGSPPGSP | 655 |
| RSC-3119 | GTAEAASASGSPAGESSRGTTIAGSPPGSP | 656 |
| RSC-3043 | GTAEAASASGTTGEAGEAAGLTPAGLTGPPGSP | 577 |
| RSC-2789 | GTAEAASASGEAGESAGATPAGLTGPPGSP | 657 |
| RSC-3109 | GTAEAASASGSASGAPLELEAGPGSPPGSP | 658 |
| RSC-3110 | GTAEAASASGSASGEPPELGAGPGSPPGSP | 659 |
| RSC-3111 | GTAEAASASGSASGEPSGLTEGPGSPPGSP | 660 |
| RSC-3112 | GTAEAASASGSASGTPAPLTEPPGSPPGSP | 661 |
| RSC-3113 | GTAEAASASGSASGTPAELTEPPGSPPGSP | 662 |
| RSC-3114 | GTAEAASASGSASGPPPGLTGPPGSPPGSP | 663 |
| RSC-3115 | GTAEAASASGSASGTPAPLGGEPGSPPGSP | 664 |
| RSC-3125 | GTAEAASASGSPAGAPEGLTGPAGSPPGSP | 665 |
| RSC-3126 | GTAEAASASGSPAGPPEGLETEAGSPPGSP | 666 |
| RSC-3127 | GTAEAASASGSPTSGQGGLTGPGSEPPGSP | 667 |
| RSC-3131 | GTAEAASASGSESAPPEGLETESTEPPGSP | 668 |
| RSC-3132 | GTAEAASASGSEGSEPLELGAASETPPGSP | 669 |
| RSC-3133 | GTAEAASASGSEGSGPAGLEAPSETPPGSP | 670 |
| RSC-3138 | GTAEAASASGSEPTPPASLEAEPGSPPGSP | 671 |

[0162] In another aspect, the release segments (either RS1 and/or RS2) for incorporation into the polypeptides of any of the subject composition embodiments described herein can be designed to be selectively sensitive in order to have different rates of cleavage and different cleavage efficiencies to the various proteases for which they are substrates. As a given protease may be found in different concentrations in diseased tissues, including but not limited to a tumor, a blood cancer, or an inflammatory tissue or site of inflammation compared to healthy tissues or in the circulation, the disclosure provides RS that have had the individual amino acid sequences engineered to have a higher or lower cleavage efficiency for a given protease in order to ensure that the polypeptide is preferentially converted from the prodrug form to the active form (i.e., by the separation and release of the antigen binding fragments and XTEN from the polypeptide after cleavage of the release segment) when in proximity to the target cell or tissue and its co-localized proteases compared to the rate of cleavage of the release segment in healthy tissue or the circulation such that the released antigen binding fragments have a greater ability to bind to ligands in the diseased tissues compared to the prodrug form that remains in circulation. By such selective designs, the therapeutic index of the resulting compositions can be improved, resulting in reduced side effects relative to convention therapeutics that do not incorporate such site-specific activation.

[0163] As used herein cleavage efficiency is defined as the log₂ value of the ratio of the percentage of the test substrate comprising the release segment cleaved to the percentage of the control substrate RSR-1517 (AC1611) cleaved when each is subjected to the protease enzyme in biochemical assays (further detailed in the Examples) in which the reaction is conducted wherein the initial substrate concentration is 6 µM, the reactions are incubated at 37° C. for 2 hours before being stopped (e.g., by adding EDTA), with the amount of digestion products and uncleaved substrate analyzed by non-reducing SDS-PAGE to establish the ratio of the percentage of the release segments cleaved. The cleavage efficiency is calculated as follows:

$$L o {g}_{2} \left(\frac{\% C l e a v e d f o r s u b s t r a t e o f i n t e r e s t}{\% c l e a v e d f o r A C 1611 i n t h e s a m e e x p e r i m e n t}\right)$$

[0164] Thus, a cleavage efficiency of -1 means that the amount of test substrate cleaved was 50% compared to that of the control substrate, while a cleavage efficiency of +1 means that the amount of test substrate cleaved was 200% compared to that of the control substrate. A higher rate of cleavage by the test protease relative to the control would result in a higher cleavage efficiency, and a slower rate of cleavage by the test protease relative to the control would result in a lower cleavage efficiency. As detailed in the Examples, a control RS sequence AC1611 (RSR-1517), having the amino acid sequence EAGRSANHEPLGLVAT (SEQ ID NO: 53), was established as having an appropriate baseline cleavage efficiency by the proteases legumain, MMP-2, MMP-7, MMP-9, MMP-14, uPA, and matriptase, when tested in in vitro biochemical assays for rates of cleavage by the individual proteases. By selective substitution of amino acids at individual locations in the RS peptides, libraries of RS were created and evaluated against the panel of the 7 proteases (detailed more fully in the Examples), resulting in profiles that were used to establish guidelines for appropriate amino acid substitutions in order to achieve RS with desired cleavage efficiencies. In making RS with desired cleavage efficiencies, substitutions using the hydrophilic amino acids A, E, G, P, S, and T are preferred, however other L-amino acids can be substituted at given positions in order to adjust the cleavage efficiency so long as the release segment retains at least some susceptibility to cleavage by a protease.

### IV). XTEN Polypeptides

[0165] In another aspect, the disclosure relates to polypeptides comprising at least a first extended recombinant polypeptide (XTEN) that is incorporated into the subject composition embodiments described herein, thereby both increasing the mass and size of the construct, and also serving to greatly reduce the ability of the antigen binding fragments to bind their ligands when the molecule is in the intact, uncleaved state, as described more fully below. In some embodiments, the disclosure provides a polypeptide comprising a single XTEN fused to the terminus of the RS that is located between the antigen binding fragment and the XTEN. In other embodiments, the disclosure provides a polypeptide comprising a first and a second XTEN (XTEN1 and XTEN2) fused to the N- and C-terminus of an RS1 and RS2, respectively, that are located between each antigen binding fragment and the XTEN.

[0166] Without being bound by theory, the incorporation of the XTEN can be incorporated into the design of the subject compositions to confer certain properties: 1) provide polypeptide compositions with an XTEN that shields the antigen binding fragments and reduces their binding affinity for the target cell markers and effector cell antigens when the composition is in its intact, prodrug form; ii) provide polypeptide compositions with an XTEN that provides enhanced half-life when administered to a subject, iii) contribute to the solubility and stability of the intact composition, thereby enhancing the pharmaceutical properties of the subject compositions; and iv) provide polypeptide compositions with an XTEN that reduces extravasation in normal tissues and organs yet permits a degree of extravasation in diseased tissues (e.g., a tumor) with larger pore sizes in the vasculature, yet could be released from the composition by action of certain mammalian proteases, thereby permitting the antigen binding fragments of the composition to more readily penetrate into the diseased tissues, e.g. a tumor, and to bind to and link together the target cell markers on the effector cell and tumor cell. To meet these needs, the disclosure provides compositions comprising one or more XTEN in which the XTEN provides increased mass and hydrodynamic radius to the resulting composition. The XTEN polypeptides of the embodiments provide certain advantages in the design of the subject compositions in that is provides not only provides increased mass and hydrodynamic radius to the composition, but its flexible, unstructured characteristics can provide a shielding effect over the antigen binding fragments of the composition, thereby reducing the binding to antigens in normal tissues or the vasculature of normal tissues that don’t express or express reduced levels of target cell markers and/or effector cell antigens. Additionally, the incorporation of XTEN into the subject compositions can enhance the solubility and proper folding of the single chain antibody binding fragments during their expression and recovery.

[0167] XTEN are polypeptides with non-naturally occurring, substantially non-repetitive sequences having a low degree or no secondary or tertiary structure under physiologic conditions, as well as one or more additional properties described in the paragraphs that follow. In some embodiments, the present disclosure provides polypeptides comprising one or more XTEN having from at least about 36, 72, 96, 100, 144, 200, 288, 292, 293, 300, 576, 584, 800, 864, 867, 868, 900, or at least about 1000 or more amino acids. In one embodiment, the present disclosure provides a polypeptide comprising an XTEN1 wherein the XTEN1 is characterized in that it has at least about 36 amino acid residues wherein at least 90%, 91%, 92%, 93%, 94%, 95%, 96%, 97%, 98%, 99% or 100% of the amino acid residues of the XTEN1 sequence are selected from glycine (G), alanine (A), serine (S), threonine (T), glutamate (E) and proline (P) and it has at least 4-6 different amino acids selected from G, A, S, T, E and P. In some embodiments, the present disclosure provides polypeptides comprising an XTEN1 having at least about 36 to about 1000, or at least 100 to about 900, or at least about 144 to about 868, or at least about 288-868 amino acid residues. In other cases, the present disclosure provides polypeptides comprising an XTEN1 having at least about 36 to about 1000, or at least 100 to about 900, or at least about 144 to about 868, or at least about 288-868 amino acid residues wherein 90%, 91%, 92%, 93%, 94%, 95%, 96%, 97%, 98%, 99%, or 100% of the amino acid residues are selected from 4-6 types of amino acids selected from the group consisting of glycine (G), alanine (A), serine (S), threonine (T), glutamate (E) and proline (P). In other cases, the present disclosure provides polypeptides comprising an XTEN1 wherein the XTEN1 is characterized in that it has at least about 36 to about 1000 amino acid residues, at least 90%, 91%, 92%, 93%, 94%, 95%, 96%, 97%, 98%, 99% or 100% of the amino acid residues of the XTEN1 sequence are selected from six types of amino acids selected from glycine (G), alanine (A), serine (S), threonine (T), glutamate (E) and proline (P).

[0168] In another embodiment, the present disclosure provides polypeptides of any of the embodiments described herein comprising an XTEN1 wherein the XTEN1 is characterized in that it has at least about 36 to about 1000, or at least about 100 to about 900, or at least 144 to about 868 amino acid residues, wherein at least 90%, 91%, 92%, 93%, 94%, 95%, 96%, 97%, 98%, 99% or 100% of the amino acid residues of the XTEN1 sequence are selected from at least three of the sequences of SEQ ID NOS: 672-675. In some cases, the XTEN 1 sequence can be assembled by any combination of the 12 amino acid units of SEQ ID NOS: 672-675 such that any length of at least 36 amino acids or longer, in 12 amino acid increments, can be achieved; e.g., 36, 48, 60, 72, 84, 96 amino acids, etc. In other cases, the polypeptides of any of the subject composition embodiments described herein can comprise an XTEN1 wherein the XTEN1 is characterized in that it has at least about 36 to about 1000, or at least about 100 to about 900, or at least 144 to about 868 amino acid residues, wherein at least 90%, 91%, 92%, 93%, 94%, 95%, 96%, 97%, 98%, 99% or 100% of the amino acid residues of the XTEN1 sequence are selected from the sequences of SEQ ID NOS: 676-734. In another embodiment, the XTEN of any of the subject composition embodiments described herein can have an affinity tag of HHHHHH (SEQ ID NO: 794), HHHHHHHH (SEQ ID NO: 795), or the sequence EPEA (SEQ ID NO: 796) appended to the N- or C-terminus of the XTEN of the composition to facilitate the purification of the composition to at least 90%, 91%, 92%, 93%, 94%, 95%, 96%, 97%, 98%, or at least 99% purity by chromatography methods known in the art; e.g., IMAC chromatography or C-tagXL chromatography, or methods described in the Examples, below.

[0169] In another embodiment, the present disclosure provides a polypeptide comprising an XTEN1 wherein the XTEN1 comprises an amino acid sequence having at least about 90%, 91%, 92%, 93%, 94%, 95%, 96%, 97%, 98%, 99%, or 100% sequence identity to an AE36 (comprising a sequence selected from any three of the sequences of SEQ ID NOS: 672-675), or a sequence selected from the sequences of AE144_1A, AE144_2A, AE144_2B, AE144_3A, AE144_3B, AE144_4A, AE144_4B, AE144_5A, AE144_6B, AE144_7A, AE284, AE288_1, AE288_2, AE288_3, AE292, AE293, AE576, AE584, AE864, AE864_2, AE865, AE866, AE867, and AE868, each of which being set forth in Table 7.

[0170] In some aspects of any of the embodiments disclosed herein, a subject polypeptide comprises an XTEN1 and an XTEN2. The configurations of the polypeptides comprising XTEN1 and XTEN2, amongst the other components, are described herein, below. In one embodiment, the present disclosure provides a polypeptide comprising an XTEN1 and an XTEN2 wherein the XTEN2 is characterized in that it has at least about 36 to about 1000 amino acid residues, wherein at least 90%, 91%, 92%, 93%, 94%, 95%, 96%, 97%, 98%, 99% or 100% of the amino acid residues of the XTEN2 sequence are selected from at least three of the sequences of SEQ ID NOS: 672-675. In another embodiment, the present disclosure provides a polypeptide comprising an XTEN1 and an XTEN2 wherein the XTEN 1 and the XTEN2 are each characterized in that it has at least about 36 to about 1000 amino acid residues, wherein at least 90%, 91%, 92%, 93%, 94%, 95%, 96%, 97%, 98%, 99% or 100% of the amino acid residues of the XTEN2 sequence are selected from the sequences of SEQ ID NOS: 676-734. In another embodiment, the polypeptides of any of the subject composition embodiments described herein can comprise an XTEN1 and an XTEN2 wherein the XTEN 1 and the XTEN2 each comprises an amino acid sequence having at least about 90%, 91%, 92%, 93%, 94%, 95%, 96%, 97%, 98%, 99%, or 100% sequence identity to a sequence selected from the sequences of AE144_1A, AE144_2A, AE144_2B, AE144_3A, AE144_3B, AE144_4A, AE144_4B, AE144_5A, AE144_6B, AE144_7A, AE284, AE288_1, AE288_2, AE288_3, AE292, AE293, AE576, AE584, AE864, AE864_2, AE865, AE866, AE867, and AE868, each of which being set forth in Table 7. In some cases of the foregoing embodiments of the paragraph, the XTEN1 and XTEN 2 are identical. In other cases of the foregoing embodiments of the paragraph, the XTEN1 and XTEN2 of the foregoing embodiments of the paragraph have different amino acid sequences. In some cases, the XTEN1 of any of the polypeptide composition embodiments having 2 XTENs is fused to the C-terminus of the polypeptide and is selected from the group consisting of AE293, AE300, AE584 and AEAE868. In other cases, the XTEN2 of any of the polypeptide composition embodiments having 2 XTENs is fused to the N-terminus of the polypeptide and is selected from the group consisting of AE144_7A, AE292, AE576, and AE864. In other cases, the XTEN1 of any of the polypeptide composition embodiments having 2 XTENs is fused to the C-terminus of the polypeptide and is selected from the group consisting of AE293, AE300, AE584 and AEAE868 and the XTEN 2 is fused to the N-terminus and is selected from the group consisting of AE144_7A, AE292, AE576, and AE864.

TABLE 6

XTEN Sequence Motifs

| Motif Name | Amino Acid Sequence | SEQ ID NO: |
|---|---|---|
| AE1 | GSPAGSPTSTEE | 672 |
| AE2 | GSEPATSGSETP | 673 |
| AE3 | GTSESATPESGP | 674 |
| AE4 | GTSTEPSEGSAP | 675 |

TABLE 7

XTEN Sequences

| XTEN Name | Amino Acid Sequence | SEQ ID NO: |
|---|---|---|
| AE144 | GSEPATSGSETPGTSESATPESGPGSEPATSGSETPGSPAGSPTSTEEGTSTE PSEGSAPGSEPATSGSETPGSEPATSGSETPGSEPATSGSETPGTSTEPSEGS APGTSESATPESGPGSEPATSGSETPGTSTEPSEGSAP | 676 |
| AE144_1 A | SPAGSPTSTEEGTSESATPESGPGTSTEPSEGSAPGSPAGSPTSTEEGTSTEP SEGSAPGTSTEPSEGSAPGTSESATPESGPGSEPATSGSETPGSEPATSGSET PGSPAGSPTSTEEGTSESATPESGPGTSTEPSEGSAPG | 677 |
| AE144_2 A | TSTEPSEGSAPGSPAGSPTSTEEGTSTEPSEGSAPGTSTEPSEGSAPGTSESA TPESGPGTSTEPSEGSAPGTSESATPESGPGSEPATSGSETPGTSTEPSEGSA PGTSTEPSEGSAPGTSESATPESGPGTSESATPESGPG | 678 |
| AE144_2 B | TSTEPSEGSAPGSPAGSPTSTEEGTSTEPSEGSAPGTSTEPSEGSAPGTSESA TPESGPGTSTEPSEGSAPGTSESATPESGPGSEPATSGSETPGTSTEPSEGSA PGTSTEPSEGSAPGTSESATPESGPGTSESATPESGPG | 679 |
| AE144_3 A | SPAGSPTSTEEGTSESATPESGPGSEPATSGSETPGTSESATPESGPGTSTEP SEGSAPGTSTEPSEGSAPGTSTEPSEGSAPGTSTEPSEGSAPGTSTEPSEGSA PGTSTEPSEGSAPGSPAGSPTSTEEGTSTEPSEGSAPG | 680 |
| AE144_3 B | SPAGSPTSTEEGTSESATPESGPGSEPATSGSETPGTSESATPESGPGTSTEP SEGSAPGTSTEPSEGSAPGTSTEPSEGSAPGTSTEPSEGSAPGTSTEPSEGSA PGTSTEPSEGSAPGSPAGSPTSTEEGTSTEPSEGSAPG | 681 |
| AE144_4 A | TSESATPESGPGSEPATSGSETPGTSESATPESGPGSEPATSGSETPGTSESA TPESGPGTSTEPSEGSAPGTSESATPESGPGSPAGSPTSTEEGSPAGSPTSTE EGSPAGSPTSTEEGTSESATPESGPGTSTEPSEGSAPG | 682 |
| AE144_4 B | TSESATPESGPGSEPATSGSETPGTSESATPESGPGSEPATSGSETPGTSESA TPESGPGTSTEPSEGSAPGTSESATPESGPGSPAGSPTSTEEGSPAGSPTSTE EGSPAGSPTSTEEGTSESATPESGPGTSTEPSEGSAPG | 683 |
| AE144_5 A | TSESATPESGPGSEPATSGSETPGTSESATPESGPGSEPATSGSETPGTSESA TPESGPGTSTEPSEGSAPGSPAGSPTSTEEGTSESATPESGPGSEPATSGSET PGTSESATPESGPGSPAGSPTSTEEGSPAGSPTSTEEG | 684 |
| AE144_6 B | TSTEPSEGSAPGTSESATPESGPGTSESATPESGPGTSESATPESGPGSEPAT SGSETPGSEPATSGSETPGSPAGSPTSTEEGTSTEPSEGSAPGTSTEPSEGSA PGSEPATSGSETPGTSESATPESGPGTSTEPSEGSAPG | 685 |
| AE288_1 | GTSESATPESGPGSEPATSGSETPGTSESATPESGPGSEPATSGSETPGTSES | 686 |
| | ATPESGPGTSTEPSEGSAPGSPAGSPTSTEEGTSESATPESGPGSEPATSGSE TPGTSESATPESGPGSPAGSPTSTEEGSPAGSPTSTEEGTSTEPSEGSAPGTS ESATPESGPGTSESATPESGPGTSESATPESGPGSEPATSGSETPGSEPATSG SETPGSPAGSPTSTEEGTSTEPSEGSAPGTSTEPSEGSAPGSEPATSGSETPG TSESATPESGPGTSTEPSEGSAP | |
| AE288_2 | GSPAGSPTSTEEGTSESATPESGPGSEPATSGSETPGTSESATPESGPGTSTE PSEGSAPGTSTEPSEGSAPGTSTEPSEGSAPGTSTEPSEGSAPGTSTEPSEGS APGTSTEPSEGSAPGSPAGSPTSTEEGTSTEPSEGSAPGTSESATPESGPGSE PATSGSETPGTSESATPESGPGSEPATSGSETPGTSESATPESGPGTSTEPSE GSAPGTSESATPESGPGSPAGSPTSTEEGSPAGSPTSTEEGSPAGSPTSTEEG TSESATPESGPGTSTEPSEGSAP | 687 |
| AE576 | GSPAGSPTSTEEGTSESATPESGPGTSTEPSEGSAPGSPAGSPTSTEEGTSTE PSEGSAPGTSTEPSEGSAPGTSESATPESGPGSEPATSGSETPGSEPATSGSE TPGSPAGSPTSTEEGTSESATPESGPGTSTEPSEGSAPGTSTEPSEGSAPGSP AGSPTSTEEGTSTEPSEGSAPGTSTEPSEGSAPGTSESATPESGPGTSTEPSE GSAPGTSESATPESGPGSEPATSGSETPGTSTEPSEGSAPGTSTEPSEGSAPG TSESATPESGPGTSESATPESGPGSPAGSPTSTEEGTSESATPESGPGSEPAT SGSETPGTSESATPESGPGTSTEPSEGSAPGTSTEPSEGSAPGTSTEPSEGSA PGTSTEPSEGSAPGTSTEPSEGSAPGTSTEPSEGSAPGSPAGSPTSTEEGTST EPSEGSAPGTSESATPESGPGSEPATSGSETPGTSESATPESGPGSEPATSGS ETPGTSESATPESGPGTSTEPSEGSAPGTSESATPESGPGSPAGSPTSTEEGS PAGSPTSTEEGSPAGSPTSTEEGTSESATPESGPGTSTEPSEGSAP | 688 |
| AE624 | MAEPAGSPTSTEEGTPGSGTASSSPGSSTPSGATGSPGASPGTSSTGSPGSPA GSPTSTEEGTSESATPESGPGTSTEPSEGSAPGSPAGSPTSTEEGTSTEPSEG SAPGTSTEPSEGSAPGTSESATPESGPGSEPATSGSETPGSEPATSGSETPGS PAGSPTSTEEGTSESATPESGPGTSTEPSEGSAPGTSTEPSEGSAPGSPAGSP TSTEEGTSTEPSEGSAPGTSTEPSEGSAPGTSESATPESGPGTSTEPSEGSAP GTSESATPESGPGSEPATSGSETPGTSTEPSEGSAPGTSTEPSEGSAPGTSES ATPESGPGTSESATPESGPGSPAGSPTSTEEGTSESATPESGPGSEPATSGSE TPGTSESATPESGPGTSTEPSEGSAPGTSTEPSEGSAPGTSTEPSEGSAPGTS TEPSEGSAPGTSTEPSEGSAPGTSTEPSEGSAPGSPAGSPTSTEEGTSTEPSE GSAPGTSESATPESGPGSEPATSGSETPGTSESATPESGPGSEPATSGSETPG TSESATPESGPGTSTEPSEGSAPGTSESATPESGPGSPAGSPTSTEEGSPAGS PTSTEEGSPAGSPTSTEEGTSESATPESGPGTSTEPSEGSAP | 689 |
| AE864 | GSPAGSPTSTEEGTSESATPESGPGTSTEPSEGSAPGSPAGSPTSTEEGTSTE PSEGSAPGTSTEPSEGSAPGTSESATPESGPGSEPATSGSETPGSEPATSGSE TPGSPAGSPTSTEEGTSESATPESGPGTSTEPSEGSAPGTSTEPSEGSAPGSP AGSPTSTEEGTSTEPSEGSAPGTSTEPSEGSAPGTSESATPESGPGTSTEPSE GSAPGTSESATPESGPGSEPATSGSETPGTSTEPSEGSAPGTSTEPSEGSAPG TSESATPESGPGTSESATPESGPGSPAGSPTSTEEGTSESATPESGPGSEPAT SGSETPGTSESATPESGPGTSTEPSEGSAPGTSTEPSEGSAPGTSTEPSEGSA PGTSTEPSEGSAPGTSTEPSEGSAPGTSTEPSEGSAPGSPAGSPTSTEEGTST EPSEGSAPGTSESATPESGPGSEPATSGSETPGTSESATPESGPGSEPATSGS ETPGTSESATPESGPGTSTEPSEGSAPGTSESATPESGPGSPAGSPTSTEEGS PAGSPTSTEEGSPAGSPTSTEEGTSESATPESGPGTSTEPSEGSAPGTSESAT PESGPGSEPATSGSETPGTSESATPESGPGSEPATSGSETPGTSESATPESGP GTSTEPSEGSAPGSPAGSPTSTEEGTSESATPESGPGSEPATSGSETPGTSES ATPESGPGSPAGSPTSTEEGSPAGSPTSTEEGTSTEPSEGSAPGTSESATPES GPGTSESATPESGPGTSESATPESGPGSEPATSGSETPGSEPATSGSETPGSP AGSPTSTEEGTSTEPSEGSAPGTSTEPSEGSAPGSEPATSGSETPGTSESATP ESGPGTSTEPSEGSAP | 690 |
| AE865 | GGSPAGSPTSTEEGTSESATPESGPGTSTEPSEGSAPGSPAGSPTSTEEGTST EPSEGSAPGTSTEPSEGSAPGTSESATPESGPGSEPATSGSETPGSEPATSGS ETPGSPAGSPTSTEEGTSESATPESGPGTSTEPSEGSAPGTSTEPSEGSAPGS PAGSPTSTEEGTSTEPSEGSAPGTSTEPSEGSAPGTSESATPESGPGTSTEPS EGSAPGTSESATPESGPGSEPATSGSETPGTSTEPSEGSAPGTSTEPSEGSAP GTSESATPESGPGTSESATPESGPGSPAGSPTSTEEGTSESATPESGPGSEPA TSGSETPGTSESATPESGPGTSTEPSEGSAPGTSTEPSEGSAPGTSTEPSEGS | 691 |
| | APGTSTEPSEGSAPGTSTEPSEGSAPGTSTEPSEGSAPGSPAGSPTSTEEGTS TEPSEGSAPGTSESATPESGPGSEPATSGSETPGTSESATPESGPGSEPATSG SETPGTSESATPESGPGTSTEPSEGSAPGTSESATPESGPGSPAGSPTSTEEG SPAGSPTSTEEGSPAGSPTSTEEGTSESATPESGPGTSTEPSEGSAPGTSESA TPESGPGSEPATSGSETPGTSESATPESGPGSEPATSGSETPGTSESATPESG PGTSTEPSEGSAPGSPAGSPTSTEEGTSESATPESGPGSEPATSGSETPGTSE SATPESGPGSPAGSPTSTEEGSPAGSPTSTEEGTSTEPSEGSAPGTSESATPE SGPGTSESATPESGPGTSESATPESGPGSEPATSGSETPGSEPATSGSETPGS PAGSPTSTEEGTSTEPSEGSAPGTSTEPSEGSAPGSEPATSGSETPGTSESAT PESGPGTSTEPSEGSAP | |
| AE866 | PGSPAGSPTSTEEGTSESATPESGPGTSTEPSEGSAPGSPAGSPTSTEEGTST EPSEGSAPGTSTEPSEGSAPGTSESATPESGPGSEPATSGSETPGSEPATSGS ETPGSPAGSPTSTEEGTSESATPESGPGTSTEPSEGSAPGTSTEPSEGSAPGS PAGSPTSTEEGTSTEPSEGSAPGTSTEPSEGSAPGTSESATPESGPGTSTEPS EGSAPGTSESATPESGPGSEPATSGSETPGTSTEPSEGSAPGTSTEPSEGSAP GTSESATPESGPGTSESATPESGPGSPAGSPTSTEEGTSESATPESGPGSEPA TSGSETPGTSESATPESGPGTSTEPSEGSAPGTSTEPSEGSAPGTSTEPSEGS APGTSTEPSEGSAPGTSTEPSEGSAPGTSTEPSEGSAPGSPAGSPTSTEEGTS TEPSEGSAPGTSESATPESGPGSEPATSGSETPGTSESATPESGPGSEPATSG SETPGTSESATPESGPGTSTEPSEGSAPGTSESATPESGPGSPAGSPTSTEEG SPAGSPTSTEEGSPAGSPTSTEEGTSESATPESGPGTSTEPSEGSAPGTSESA TPESGPGSEPATSGSETPGTSESATPESGPGSEPATSGSETPGTSESATPESG PGTSTEPSEGSAPGSPAGSPTSTEEGTSESATPESGPGSEPATSGSETPGTSE SATPESGPGSPAGSPTSTEEGSPAGSPTSTEEGTSTEPSEGSAPGTSESATPE SGPGTSESATPESGPGTSESATPESGPGSEPATSGSETPGSEPATSGSETPGS PAGSPTSTEEGTSTEPSEGSAPGTSTEPSEGSAPGSEPATSGSETPGTSESAT PESGPGTSTEPSEGSAPG | 692 |
| AE1152 | GSPAGSPTSTEEGTSESATPESGPGTSTEPSEGSAPGSPAGSPTSTEEGTSTE PSEGSAPGTSTEPSEGSAPGTSESATPESGPGSEPATSGSETPGSEPATSGSE TPGSPAGSPTSTEEGTSESATPESGPGTSTEPSEGSAPGTSTEPSEGSAPGSP AGSPTSTEEGTSTEPSEGSAPGTSTEPSEGSAPGTSESATPESGPGTSTEPSE GSAPGTSESATPESGPGSEPATSGSETPGTSTEPSEGSAPGTSTEPSEGSAPG TSESATPESGPGTSESATPESGPGSPAGSPTSTEEGTSESATPESGPGSEPAT SGSETPGTSESATPESGPGTSTEPSEGSAPGTSTEPSEGSAPGTSTEPSEGSA PGTSTEPSEGSAPGTSTEPSEGSAPGTSTEPSEGSAPGSPAGSPTSTEEGTST EPSEGSAPGTSESATPESGPGSEPATSGSETPGTSESATPESGPGSEPATSGS ETPGTSESATPESGPGTSTEPSEGSAPGTSESATPESGPGSPAGSPTSTEEGS PAGSPTSTEEGSPAGSPTSTEEGTSESATPESGPGTSTEPSEGSAPGTSESAT PESGPGSEPATSGSETPGTSESATPESGPGSEPATSGSETPGTSESATPESGP GTSTEPSEGSAPGSPAGSPTSTEEGTSESATPESGPGSEPATSGSETPGTSES ATPESGPGSPAGSPTSTEEGSPAGSPTSTEEGTSTEPSEGSAPGTSESATPES GPGTSESATPESGPGTSESATPESGPGSEPATSGSETPGSEPATSGSETPGSP AGSPTSTEEGTSTEPSEGSAPGTSTEPSEGSAPGSEPATSGSETPGTSESATP ESGPGTSTEPSEGSAPGTSESATPESGPGSEPATSGSETPGTSESATPESGPG SEPATSGSETPGTSESATPESGPGTSTEPSEGSAPGSPAGSPTSTEEGTSESA TPESGPGSEPATSGSETPGTSESATPESGPGSPAGSPTSTEEGSPAGSPTSTE EGTSTEPSEGSAPGTSESATPESGPGTSESATPESGPGTSESATPESGPGSEP ATSGSETPGSEPATSGSETPGSPAGSPTSTEEGTSTEPSEGSAPGTSTEPSEG SAPGSEPATSGSETPGTSESATPESGPGTSTEPSEGSAP | 693 |
| AE144A | STEPSEGSAPGSPAGSPTSTEEGTSTEPSEGSAPGTSESATPESGPGSEPATS GSETPGTSESATPESGPGSEPATSGSETPGTSESATPESGPGTSTEPSEGSAP GTSESATPESGPGSPAGSPTSTEEGSPAGSPTSTEEGS | 694 |
| AE144B | SEPATSGSETPGTSESATPESGPGSEPATSGSETPGTSESATPESGPGTSTEP SEGSAPGSPAGSPTSTEEGTSESATPESGPGSEPATSGSETPGTSESATPESG PGSPAGSPTSTEEGSPAGSPTSTEEGTSTEPSEGSAPG | 695 |
| AE180A | TSTEEGTSESATPESGPGSEPATSGSETPGTSESATPESGPGSPAGSPTSTEE GSPAGSPTSTEEGTSTEPSEGSAPGTSESATPESGPGTSESATPESGPGTSES ATPESGPGSEPATSGSETPGSEPATSGSETPGSPAGSPTSTEEGTSTEPSEGS | 696 |
| | APGTSTEPSEGSAPGSEPATS | |
| AE216A | PESGPGTSTEPSEGSAPGSPAGSPTSTEEGTSESATPESGPGSEPATSGSETP GTSESATPESGPGSPAGSPTSTEEGSPAGSPTSTEEGTSTEPSEGSAPGTSES ATPESGPGTSESATPESGPGTSESATPESGPGSEPATSGSETPGSEPATSGSE TPGSPAGSPTSTEEGTSTEPSEGSAPGTSTEPSEGSAPGSEPATSGSETPGTS ESAT | 697 |
| AE252A | ESGPGSEPATSGSETPGTSESATPESGPGTSTEPSEGSAPGSPAGSPTSTEEG TSESATPESGPGSEPATSGSETPGTSESATPESGPGSPAGSPTSTEEGSPAGS PTSTEEGTSTEPSEGSAPGTSESATPESGPGTSESATPESGPGTSESATPESG PGSEPATSGSETPGSEPATSGSETPGSPAGSPTSTEEGTSTEPSEGSAPGTST EPSEGSAPGSEPATSGSETPGTSESATPESGPGTSTEPSE | 698 |
| AE288A | TPESGPGTSTEPSEGSAPGTSESATPESGPGSEPATSGSETPGTSESATPESG PGSEPATSGSETPGTSESATPESGPGTSTEPSEGSAPGSPAGSPTSTEEGTSE SATPESGPGSEPATSGSETPGTSESATPESGPGSPAGSPTSTEEGSPAGSPTS TEEGTSTEPSEGSAPGTSESATPESGPGTSESATPESGPGTSESATPESGPGS EPATSGSETPGSEPATSGSETPGSPAGSPTSTEEGTSTEPSEGSAPGTSTEPS EGSAPGSEPATSGSETPGTSESA | 699 |
| AE324A | PESGPGSPAGSPTSTEEGSPAGSPTSTEEGSPAGSPTSTEEGTSESATPESGP GTSTEPSEGSAPGTSESATPESGPGSEPATSGSETPGTSESATPESGPGSEPA TSGSETPGTSESATPESGPGTSTEPSEGSAPGSPAGSPTSTEEGTSESATPES GPGSEPATSGSETPGTSESATPESGPGSPAGSPTSTEEGSPAGSPTSTEEGTS TEPSEGSAPGTSESATPESGPGTSESATPESGPGTSESATPESGPGSEPATSG SETPGSEPATSGSETPGSPAGSPTSTEEGTSTEPSEGSAPGTSTEPSEGSAPG SEPATS | 700 |
| AE360A | PESGPGTSTEPSEGSAPGTSESATPESGPGSPAGSPTSTEEGSPAGSPTSTEE GSPAGSPTSTEEGTSESATPESGPGTSTEPSEGSAPGTSESATPESGPGSEPA TSGSETPGTSESATPESGPGSEPATSGSETPGTSESATPESGPGTSTEPSEGS APGSPAGSPTSTEEGTSESATPESGPGSEPATSGSETPGTSESATPESGPGSP AGSPTSTEEGSPAGSPTSTEEGTSTEPSEGSAPGTSESATPESGPGTSESATP ESGPGTSESATPESGPGSEPATSGSETPGSEPATSGSETPGSPAGSPTSTEEG TSTEPSEGSAPGTSTEPSEGSAPGSEPATSGSETPGTSESAT | 701 |
| AE396A | PESGPGSEPATSGSETPGTSESATPESGPGTSTEPSEGSAPGTSESATPESGP GSPAGSPTSTEEGSPAGSPTSTEEGSPAGSPTSTEEGTSESATPESGPGTSTE PSEGSAPGTSESATPESGPGSEPATSGSETPGTSESATPESGPGSEPATSGSE TPGTSESATPESGPGTSTEPSEGSAPGSPAGSPTSTEEGTSESATPESGPGSE PATSGSETPGTSESATPESGPGSPAGSPTSTEEGSPAGSPTSTEEGTSTEPSE GSAPGTSESATPESGPGTSESATPESGPGTSESATPESGPGSEPATSGSETPG SEPATSGSETPGSPAGSPTSTEEGTSTEPSEGSAPGTSTEPS | 702 |
| AE432A | EGSAPGSPAGSPTSTEEGTSTEPSEGSAPGTSESATPESGPGSEPATSGSETP GTSESATPESGPGSEPATSGSETPGTSESATPESGPGTSTEPSEGSAPGTSES ATPESGPGSPAGSPTSTEEGSPAGSPTSTEEGSPAGSPTSTEEGTSESATPES GPGTSTEPSEGSAPGTSESATPESGPGSEPATSGSETPGTSESATPESGPGSE PATSGSETPGTSESATPESGPGTSTEPSEGSAPGSPAGSPTSTEEGTSESATP ESGPGSEPATSGSETPGTSESATPESGPGSPAGSPTSTEEGSPAGSPTSTEEG TSTEPSEGSAPGTSESATPESGPGTSESATPESGPGTSESATPESGPGSEPAT SGSETPGSEPATSGSETPGSPAGSPTSTEEGTSTEPSEGSAPGTSTEPSEGSA PGSEPATS | 703 |
| AE468A | EGSAPGTSTEPSEGSAPGTSTEPSEGSAPGSPAGSPTSTEEGTSTEPSEGSAP GTSESATPESGPGSEPATSGSETPGTSESATPESGPGSEPATSGSETPGTSES ATPESGPGTSTEPSEGSAPGTSESATPESGPGSPAGSPTSTEEGSPAGSPTST EEGSPAGSPTSTEEGTSESATPESGPGTSTEPSEGSAPGTSESATPESGPGSE PATSGSETPGTSESATPESGPGSEPATSGSETPGTSESATPESGPGTSTEPSE GSAPGSPAGSPTSTEEGTSESATPESGPGSEPATSGSETPGTSESATPESGPG SPAGSPTSTEEGSPAGSPTSTEEGTSTEPSEGSAPGTSESATPESGPGTSESA TPESGPGTSESATPESGPGSEPATSGSETPGSEPATSGSETPGSPAGSPTSTE EGTSTEPSEGSAPGTSTEPSEGSAPGSEPATSGSETPGTSESAT | 704 |
| AE504A | EGSAPGTSTEPSEGSAPGTSTEPSEGSAPGTSTEPSEGSAPGTSTEPSEGSAP | 705 |
| | GSPAGSPTSTEEGTSTEPSEGSAPGTSESATPESGPGSEPATSGSETPGTSES ATPESGPGSEPATSGSETPGTSESATPESGPGTSTEPSEGSAPGTSESATPES GPGSPAGSPTSTEEGSPAGSPTSTEEGSPAGSPTSTEEGTSESATPESGPGTS TEPSEGSAPGTSESATPESGPGSEPATSGSETPGTSESATPESGPGSEPATSG SETPGTSESATPESGPGTSTEPSEGSAPGSPAGSPTSTEEGTSESATPESGPG SEPATSGSETPGTSESATPESGPGSPAGSPTSTEEGSPAGSPTSTEEGTSTEP SEGSAPGTSESATPESGPGTSESATPESGPGTSESATPESGPGSEPATSGSET PGSEPATSGSETPGSPAGSPTSTEEGTSTEPSEGSAPGTSTEPSEGSAPGSEP ATSGSETPGTSESATPESGPGTSTEPS | |
| AE540A | TPESGPGSPAGSPTSTEEGTSESATPESGPGSEPATSGSETPGTSESATPESG PGTSTEPSEGSAPGTSTEPSEGSAPGTSTEPSEGSAPGTSTEPSEGSAPGTST EPSEGSAPGTSTEPSEGSAPGSPAGSPTSTEEGTSTEPSEGSAPGTSESATPE SGPGSEPATSGSETPGTSESATPESGPGSEPATSGSETPGTSESATPESGPGT STEPSEGSAPGTSESATPESGPGSPAGSPTSTEEGSPAGSPTSTEEGSPAGSP TSTEEGTSESATPESGPGTSTEPSEGSAPGTSESATPESGPGSEPATSGSETP GTSESATPESGPGSEPATSGSETPGTSESATPESGPGTSTEPSEGSAPGSPAG SPTSTEEGTSESATPESGPGSEPATSGSETPGTSESATPESGPGSPAGSPTST EEGSPAGSPTSTEEGTSTEPSEGSAPGTSESATPESGPGTSESATPESGPGTS ESATPESGPGSEPATSGSETPGSEPATSGSETPGSPAGSPTSTEEGTSTEPSE GSAPGTSTEP | 706 |
| AE576A | TPESGPGTSESATPESGPGSPAGSPTSTEEGTSESATPESGPGSEPATSGSET PGTSESATPESGPGTSTEPSEGSAPGTSTEPSEGSAPGTSTEPSEGSAPGTST EPSEGSAPGTSTEPSEGSAPGTSTEPSEGSAPGSPAGSPTSTEEGTSTEPSEG SAPGTSESATPESGPGSEPATSGSETPGTSESATPESGPGSEPATSGSETPGT SESATPESGPGTSTEPSEGSAPGTSESATPESGPGSPAGSPTSTEEGSPAGSP TSTEEGSPAGSPTSTEEGTSESATPESGPGTSTEPSEGSAPGTSESATPESGP GSEPATSGSETPGTSESATPESGPGSEPATSGSETPGTSESATPESGPGTSTE PSEGSAPGSPAGSPTSTEEGTSESATPESGPGSEPATSGSETPGTSESATPES GPGSPAGSPTSTEEGSPAGSPTSTEEGTSTEPSEGSAPGTSESATPESGPGTS ESATPESGPGTSESATPESGPGSEPATSGSETPGSEPATSGSETPGSPAGSPT STEEGTSTEPSEGSAPGTSTEPSEGSAPGSEPATSGSETPGTSESA | 707 |
| AE612A | GSETPGTSTEPSEGSAPGTSTEPSEGSAPGTSESATPESGPGTSESATPESGP GSPAGSPTSTEEGTSESATPESGPGSEPATSGSETPGTSESATPESGPGTSTE PSEGSAPGTSTEPSEGSAPGTSTEPSEGSAPGTSTEPSEGSAPGTSTEPSEGS APGTSTEPSEGSAPGSPAGSPTSTEEGTSTEPSEGSAPGTSESATPESGPGSE PATSGSETPGTSESATPESGPGSEPATSGSETPGTSESATPESGPGTSTEPSE GSAPGTSESATPESGPGSPAGSPTSTEEGSPAGSPTSTEEGSPAGSPTSTEEG TSESATPESGPGTSTEPSEGSAPGTSESATPESGPGSEPATSGSETPGTSESA TPESGPGSEPATSGSETPGTSESATPESGPGTSTEPSEGSAPGSPAGSPTSTE EGTSESATPESGPGSEPATSGSETPGTSESATPESGPGSPAGSPTSTEEGSPA GSPTSTEEGTSTEPSEGSAPGTSESATPESGPGTSESATPESGPGTSESATPE SGPGSEPATSGSETPGSEPATSGSETPGSPAGSPTSTEEGTSTEPSEGSAPGT STEPSEGSAPGSEPATSGSETPGTSESAT | 708 |
| AE648A | PESGPGTSTEPSEGSAPGTSESATPESGPGSEPATSGSETPGTSTEPSEGSAP GTSTEPSEGSAPGTSESATPESGPGTSESATPESGPGSPAGSPTSTEEGTSES ATPESGPGSEPATSGSETPGTSESATPESGPGTSTEPSEGSAPGTSTEPSEGS APGTSTEPSEGSAPGTSTEPSEGSAPGTSTEPSEGSAPGTSTEPSEGSAPGSP AGSPTSTEEGTSTEPSEGSAPGTSESATPESGPGSEPATSGSETPGTSESATP ESGPGSEPATSGSETPGTSESATPESGPGTSTEPSEGSAPGTSESATPESGPG SPAGSPTSTEEGSPAGSPTSTEEGSPAGSPTSTEEGTSESATPESGPGTSTEP SEGSAPGTSESATPESGPGSEPATSGSETPGTSESATPESGPGSEPATSGSET PGTSESATPESGPGTSTEPSEGSAPGSPAGSPTSTEEGTSESATPESGPGSEP ATSGSETPGTSESATPESGPGSPAGSPTSTEEGSPAGSPTSTEEGTSTEPSEG SAPGTSESATPESGPGTSESATPESGPGTSESATPESGPGSEPATSGSETPGS EPATSGSETPGSPAGSPTSTEEGTSTEPSEGSAPGTSTEPSEGSAPGSEPATS GSETPGTSESAT | 709 |
| AE684A | EGSAPGSPAGSPTSTEEGTSTEPSEGSAPGTSTEPSEGSAPGTSESATPESGP GTSTEPSEGSAPGTSESATPESGPGSEPATSGSETPGTSTEPSEGSAPGTSTE | 710 |
| | PSEGSAPGTSESATPESGPGTSESATPESGPGSPAGSPTSTEEGTSESATPES GPGSEPATSGSETPGTSESATPESGPGTSTEPSEGSAPGTSTEPSEGSAPGTS TEPSEGSAPGTSTEPSEGSAPGTSTEPSEGSAPGTSTEPSEGSAPGSPAGSPT STEEGTSTEPSEGSAPGTSESATPESGPGSEPATSGSETPGTSESATPESGPG SEPATSGSETPGTSESATPESGPGTSTEPSEGSAPGTSESATPESGPGSPAGS PTSTEEGSPAGSPTSTEEGSPAGSPTSTEEGTSESATPESGPGTSTEPSEGSA PGTSESATPESGPGSEPATSGSETPGTSESATPESGPGSEPATSGSETPGTSE SATPESGPGTSTEPSEGSAPGSPAGSPTSTEEGTSESATPESGPGSEPATSGS ETPGTSESATPESGPGSPAGSPTSTEEGSPAGSPTSTEEGTSTEPSEGSAPGT SESATPESGPGTSESATPESGPGTSESATPESGPGSEPATSGSETPGSEPATS GSETPGSPAGSPTSTEEGTSTEPSEGSAPGTSTEPSEGSAPGSEPATS | |
| AE720A | TSGSETPGSEPATSGSETPGSPAGSPTSTEEGTSESATPESGPGTSTEPSEGS APGTSTEPSEGSAPGSPAGSPTSTEEGTSTEPSEGSAPGTSTEPSEGSAPGTS ESATPESGPGTSTEPSEGSAPGTSESATPESGPGSEPATSGSETPGTSTEPSE GSAPGTSTEPSEGSAPGTSESATPESGPGTSESATPESGPGSPAGSPTSTEEG TSESATPESGPGSEPATSGSETPGTSESATPESGPGTSTEPSEGSAPGTSTEP SEGSAPGTSTEPSEGSAPGTSTEPSEGSAPGTSTEPSEGSAPGTSTEPSEGSA PGSPAGSPTSTEEGTSTEPSEGSAPGTSESATPESGPGSEPATSGSETPGTSE SATPESGPGSEPATSGSETPGTSESATPESGPGTSTEPSEGSAPGTSESATPE SGPGSPAGSPTSTEEGSPAGSPTSTEEGSPAGSPTSTEEGTSESATPESGPGT STEPSEGSAPGTSESATPESGPGSEPATSGSETPGTSESATPESGPGSEPATS GSETPGTSESATPESGPGTSTEPSEGSAPGSPAGSPTSTEEGTSESATPESGP GSEPATSGSETPGTSESATPESGPGSPAGSPTSTEEGSPAGSPTSTEEGTSTE PSEGSAPGTSESATPESGPGTSESATPESGPGTSESATPESGPGSEPATSGSE TPGSEPATSGSETPGSPAGSPTSTEEGTSTE | 711 |
| AE756A | TSGSETPGSEPATSGSETPGSPAGSPTSTEEGTSESATPESGPGTSTEPSEGS APGTSTEPSEGSAPGSPAGSPTSTEEGTSTEPSEGSAPGTSTEPSEGSAPGTS ESATPESGPGTSTEPSEGSAPGTSESATPESGPGSEPATSGSETPGTSTEPSE GSAPGTSTEPSEGSAPGTSESATPESGPGTSESATPESGPGSPAGSPTSTEEG TSESATPESGPGSEPATSGSETPGTSESATPESGPGTSTEPSEGSAPGTSTEP SEGSAPGTSTEPSEGSAPGTSTEPSEGSAPGTSTEPSEGSAPGTSTEPSEGSA PGSPAGSPTSTEEGTSTEPSEGSAPGTSESATPESGPGSEPATSGSETPGTSE SATPESGPGSEPATSGSETPGTSESATPESGPGTSTEPSEGSAPGTSESATPE SGPGSPAGSPTSTEEGSPAGSPTSTEEGSPAGSPTSTEEGTSESATPESGPGT STEPSEGSAPGTSESATPESGPGSEPATSGSETPGTSESATPESGPGSEPATS GSETPGTSESATPESGPGTSTEPSEGSAPGSPAGSPTSTEEGTSESATPESGP GSEPATSGSETPGTSESATPESGPGSPAGSPTSTEEGSPAGSPTSTEEGTSTE PSEGSAPGTSESATPESGPGTSESATPESGPGTSESATPESGPGSEPATSGSE TPGSEPATSGSETPGSPAGSPTSTEEGTSTEPSEGSAPGTSTEPSEGSAPGSE PATSGSETPGTSES | 712 |
| AE792A | EGSAPGTSESATPESGPGSEPATSGSETPGSEPATSGSETPGSPAGSPTSTEE GTSESATPESGPGTSTEPSEGSAPGTSTEPSEGSAPGSPAGSPTSTEEGTSTE PSEGSAPGTSTEPSEGSAPGTSESATPESGPGTSTEPSEGSAPGTSESATPES GPGSEPATSGSETPGTSTEPSEGSAPGTSTEPSEGSAPGTSESATPESGPGTS ESATPESGPGSPAGSPTSTEEGTSESATPESGPGSEPATSGSETPGTSESATP ESGPGTSTEPSEGSAPGTSTEPSEGSAPGTSTEPSEGSAPGTSTEPSEGSAPG TSTEPSEGSAPGTSTEPSEGSAPGSPAGSPTSTEEGTSTEPSEGSAPGTSESA TPESGPGSEPATSGSETPGTSESATPESGPGSEPATSGSETPGTSESATPESG PGTSTEPSEGSAPGTSESATPESGPGSPAGSPTSTEEGSPAGSPTSTEEGSPA GSPTSTEEGTSESATPESGPGTSTEPSEGSAPGTSESATPESGPGSEPATSGS ETPGTSESATPESGPGSEPATSGSETPGTSESATPESGPGTSTEPSEGSAPGS PAGSPTSTEEGTSESATPESGPGSEPATSGSETPGTSESATPESGPGSPAGSP TSTEEGSPAGSPTSTEEGTSTEPSEGSAPGTSESATPESGPGTSESATPESGP GTSESATPESGPGSEPATSGSETPGSEPATSGSETPGSPAGSPTSTEEGTSTE PSEGSAPGTSTEPSEGSAPGSEPATSGSETPGTSESATPESGPGTSTEPS | 713 |
| AE828A | PESGPGTSTEPSEGSAPGSPAGSPTSTEEGTSTEPSEGSAPGTSTEPSEGSAP GTSESATPESGPGSEPATSGSETPGSEPATSGSETPGSPAGSPTSTEEGTSES ATPESGPGTSTEPSEGSAPGTSTEPSEGSAPGSPAGSPTSTEEGTSTEPSEGS | 714 |
| | APGTSTEPSEGSAPGTSESATPESGPGTSTEPSEGSAPGTSESATPESGPGSE PATSGSETPGTSTEPSEGSAPGTSTEPSEGSAPGTSESATPESGPGTSESATP ESGPGSPAGSPTSTEEGTSESATPESGPGSEPATSGSETPGTSESATPESGPG TSTEPSEGSAPGTSTEPSEGSAPGTSTEPSEGSAPGTSTEPSEGSAPGTSTEP SEGSAPGTSTEPSEGSAPGSPAGSPTSTEEGTSTEPSEGSAPGTSESATPESG PGSEPATSGSETPGTSESATPESGPGSEPATSGSETPGTSESATPESGPGTST EPSEGSAPGTSESATPESGPGSPAGSPTSTEEGSPAGSPTSTEEGSPAGSPTS TEEGTSESATPESGPGTSTEPSEGSAPGTSESATPESGPGSEPATSGSETPGT SESATPESGPGSEPATSGSETPGTSESATPESGPGTSTEPSEGSAPGSPAGSP TSTEEGTSESATPESGPGSEPATSGSETPGTSESATPESGPGSPAGSPTSTEE GSPAGSPTSTEEGTSTEPSEGSAPGTSESATPESGPGTSESATPESGPGTSES ATPESGPGSEPATSGSETPGSEPATSGSETPGSPAGSPTSTEEGTSTEPSEGS APGTSTEPSEGSAPGSEPATSGSETPGTSESAT | |
| AE869 | GSPGSPAGSPTSTEEGTSESATPESGPGTSTEPSEGSAPGSPAGSPTSTEEGT STEPSEGSAPGTSTEPSEGSAPGTSESATPESGPGSEPATSGSETPGSEPATS GSETPGSPAGSPTSTEEGTSESATPESGPGTSTEPSEGSAPGTSTEPSEGSAP GSPAGSPTSTEEGTSTEPSEGSAPGTSTEPSEGSAPGTSESATPESGPGTSTE PSEGSAPGTSESATPESGPGSEPATSGSETPGTSTEPSEGSAPGTSTEPSEGS APGTSESATPESGPGTSESATPESGPGSPAGSPTSTEEGTSESATPESGPGSE PATSGSETPGTSESATPESGPGTSTEPSEGSAPGTSTEPSEGSAPGTSTEPSE GSAPGTSTEPSEGSAPGTSTEPSEGSAPGTSTEPSEGSAPGSPAGSPTSTEEG TSTEPSEGSAPGTSESATPESGPGSEPATSGSETPGTSESATPESGPGSEPAT SGSETPGTSESATPESGPGTSTEPSEGSAPGTSESATPESGPGSPAGSPTSTE EGSPAGSPTSTEEGSPAGSPTSTEEGTSESATPESGPGTSTEPSEGSAPGTSE SATPESGPGSEPATSGSETPGTSESATPESGPGSEPATSGSETPGTSESATPE SGPGTSTEPSEGSAPGSPAGSPTSTEEGTSESATPESGPGSEPATSGSETPGT SESATPESGPGSPAGSPTSTEEGSPAGSPTSTEEGTSTEPSEGSAPGTSESAT PESGPGTSESATPESGPGTSESATPESGPGSEPATSGSETPGSEPATSGSETP GSPAGSPTSTEEGTSTEPSEGSAPGTSTEPSEGSAPGSEPATSGSETPGTSES ATPESGPGTSTEPSEGSAPGR | 715 |
| AE144_R 1 | SAGSPGSPAGSPTSTEEGTSESATPESGPGTSTEPSEGSAPGSPAGSPTSTEE GTSTEPSEGSAPGTSTEPSEGSAPGTSESATPESGPGSEPATSGSETPGSEPA TSGSETPGSPAGSPTSTEEGTSESATPESGPGTESASR | 716 |
| AE288 _R 1 | SAGSPTGPGSEPATSGSETPGTSESATPESGPGSEPATSGSETPGTSESATPE SGPGTSTEPSEGSAPGSPAGSPTSTEEGTSESATPESGPGSEPATSGSETPGT SESATPESGPGSPAGSPTSTEEGSPAGSPTSTEEGTSTEPSEGSAPGTSESAT PESGPGTSESATPESGPGTSESATPESGPGSEPATSGSETPGSEPATSGSETP GSPAGSPTSTEEGTSTEPSEGSAPGTSTEPSEGSAPGSEPATSGSETPGTSES ATPESGPGTSTEPSEGSAPSASR | 717 |
| AE432_R 1 | SAGSPGSPAGSPTSTEEGTSESATPESGPGTSTEPSEGSAPGSPAGSPTSTEE GTSTEPSEGSAPGTSTEPSEGSAPGTSESATPESGPGSEPATSGSETPGSEPA TSGSETPGSPAGSPTSTEEGTSESATPESGPGTSTEPSEGSAPGTSTEPSEGS APGSPAGSPTSTEEGTSTEPSEGSAPGTSTEPSEGSAPGTSESATPESGPGTS TEPSEGSAPGTSESATPESGPGSEPATSGSETPGTSTEPSEGSAPGTSTEPSE GSAPGTSESATPESGPGTSESATPESGPGSPAGSPTSTEEGTSESATPESGPG SEPATSGSETPGTSESATPESGPGTSTEPSEGSAPGTSTEPSEGSAPGTSTEP SEGSAPGTSTEPSEGSAPGTSTEPSEGSAPGTSTEPSEGSAPGSPAGSPTSTE EGTESASR | 718 |
| AE576_R 1 | SAGSPTEEGTSESATPESGPGSEPATSGSETPGTSESATPESGPGTSTEPSEG SAPGTSTEPSEGSAPGTSTEPSEGSAPGTSTEPSEGSAPGTSTEPSEGSAPGT STEPSEGSAPGSPAGSPTSTEEGTSTEPSEGSAPGTSESATPESGPGSEPATS GSETPGTSESATPESGPGSEPATSGSETPGTSESATPESGPGTSTEPSEGSAP GTSESATPESGPGSPAGSPTSTEEGSPAGSPTSTEEGSPAGSPTSTEEGTSES ATPESGPGTSTEPSEGSAPGTSESATPESGPGSEPATSGSETPGTSESATPES GPGSEPATSGSETPGTSESATPESGPGTSTEPSEGSAPGSPAGSPTSTEEGTS ESATPESGPGSEPATSGSETPGTSESATPESGPGSPAGSPTSTEEGSPAGSPT STEEGTSTEPSEGSAPGTSESATPESGPGTSESATPESGPGTSESATPESGPG SEPATSGSETPGSEPATSGSETPGSPAGSPTSTEEGTSTEPSEGSAPGTSTEP | 719 |
| | SEGSAPGSEPATSGSETPGTSESATPESGPGTSTEPSEGSAPSASR | |
| AE864_R 1 | SAGSPGSPAGSPTSTEEGTSESATPESGPGTSTEPSEGSAPGSPAGSPTSTEE GTSTEPSEGSAPGTSTEPSEGSAPGTSESATPESGPGSEPATSGSETPGSEPA TSGSETPGSPAGSPTSTEEGTSESATPESGPGTSTEPSEGSAPGTSTEPSEGS APGSPAGSPTSTEEGTSTEPSEGSAPGTSTEPSEGSAPGTSESATPESGPGTS TEPSEGSAPGTSESATPESGPGSEPATSGSETPGTSTEPSEGSAPGTSTEPSE GSAPGTSESATPESGPGTSESATPESGPGSPAGSPTSTEEGTSESATPESGPG SEPATSGSETPGTSESATPESGPGTSTEPSEGSAPGTSTEPSEGSAPGTSTEP SEGSAPGTSTEPSEGSAPGTSTEPSEGSAPGTSTEPSEGSAPGSPAGSPTSTE EGTSTEPSEGSAPGTSESATPESGPGSEPATSGSETPGTSESATPESGPGSEP ATSGSETPGTSESATPESGPGTSTEPSEGSAPGTSESATPESGPGSPAGSPTS TEEGSPAGSPTSTEEGSPAGSPTSTEEGTSESATPESGPGTSTEPSEGSAPGT SESATPESGPGSEPATSGSETPGTSESATPESGPGSEPATSGSETPGTSESAT PESGPGTSTEPSEGSAPGSPAGSPTSTEEGTSESATPESGPGSEPATSGSETP GTSESATPESGPGSPAGSPTSTEEGSPAGSPTSTEEGTSTEPSEGSAPGTSES ATPESGPGTSESATPESGPGTSESATPESGPGSEPATSGSETPGSEPATSGSE TPGSPAGSPTSTEEGTSTEPSEGSAPGTSTEPSEGSAPGSEPATSGSETPGTS ESATPESGPGTESASR | 720 |
| AE712 | PGSPAGSPTSTEEGTSESATPESGPGTSTEPSEGSAPGSPAGSPTSTEEGTST EPSEGSAPGTSTEPSEGSAPGTSESATPESGPGSEPATSGSETPGSEPATSGS ETPGSPAGSPTSTEEGTSESATPESGPGTSTEPSEGSAPGTSTEPSEGSAPGS PAGSPTSTEEGTSTEPSEGSAPGTSTEPSEGSAPGTSESATPESGPGTSTEPS EGSAPGTSESATPESGPGSEPATSGSETPGTSTEPSEGSAPGTSTEPSEGSAP GTSESATPESGPGTSESATPESGPGSPAGSPTSTEEGTSESATPESGPGSEPA TSGSETPGTSESATPESGPGTSTEPSEGSAPGTSTEPSEGSAPGTSTEPSEGS APGTSTEPSEGSAPGTSTEPSEGSAPGTSTEPSEGSAPGSPAGSPTSTEEGTS TEPSEGSAPGTSESATPESGPGSEPATSGSETPGTSESATPESGPGSEPATSG SETPGTSESATPESGPGTSTEPSEGSAPGTSESATPESGPGSPAGSPTSTEEG SPAGSPTSTEEGSPAGSPTSTEEGTSESATPESGPGTSTEPSEGSAPGTSESA TPESGPGSEPATSGSETPGTSESATPESGPGSEPATSGSETPGTSESATPESG PGTSTEPSEGSAPGSPAGSPTSTEEGTSESATPESGPGSEPATSGSETPGTSE SATPESGPGSPAGSPTSTEAHHH | 721 |
| AE864_R 2 | GSPGAGSPAGSPTSTEEGTSESATPESGPGTSTEPSEGSAPGSPAGSPTSTEE GTSTEPSEGSAPGTSTEPSEGSAPGTSESATPESGPGSEPATSGSETPGSEPA TSGSETPGSPAGSPTSTEEGTSESATPESGPGTSTEPSEGSAPGTSTEPSEGS APGSPAGSPTSTEEGTSTEPSEGSAPGTSTEPSEGSAPGTSESATPESGPGTS TEPSEGSAPGTSESATPESGPGSEPATSGSETPGTSTEPSEGSAPGTSTEPSE GSAPGTSESATPESGPGTSESATPESGPGSPAGSPTSTEEGTSESATPESGPG SEPATSGSETPGTSESATPESGPGTSTEPSEGSAPGTSTEPSEGSAPGTSTEP SEGSAPGTSTEPSEGSAPGTSTEPSEGSAPGTSTEPSEGSAPGSPAGSPTSTE EGTSTEPSEGSAPGTSESATPESGPGSEPATSGSETPGTSESATPESGPGSEP ATSGSETPGTSESATPESGPGTSTEPSEGSAPGTSESATPESGPGSPAGSPTS TEEGSPAGSPTSTEEGSPAGSPTSTEEGTSESATPESGPGTSTEPSEGSAPGT SESATPESGPGSEPATSGSETPGTSESATPESGPGSEPATSGSETPGTSESAT PESGPGTSTEPSEGSAPGSPAGSPTSTEEGTSESATPESGPGSEPATSGSETP GTSESATPESGPGSPAGSPTSTEEGSPAGSPTSTEEGTSTEPSEGSAPGTSES ATPESGPGTSESATPESGPGTSESATPESGPGSEPATSGSETPGSEPATSGSE TPGSPAGSPTSTEEGTSTEPSEGSAPGTSTEPSEGSAPGSEPATSGSETPGTS ESATPESGPGTESASR | 722 |
| AE288_3 | SPAGSPTSTEEGTSESATPESGPGTSTEPSEGSAPGTSESATPESGPGSEPAT SGSETPGTSESATPESGPGSEPATSGSETPGTSESATPESGPGTSTEPSEGSA PGSPAGSPTSTEEGTSESATPESGPGSEPATSGSETPGTSESATPESGPGSPA GSPTSTEEGSPAGSPTSTEEGTSTEPSEGSAPGTSESATPESGPGTSESATPE SGPGTSESATPESGPGSEPATSGSETPGSEPATSGSETPGSPAGSPTSTEEGT STEPSEGSAPGTSTEPSEGSAPG | 723 |
| AE284 | GTSESATPESGPGSEPATSGSETPGTSESATPESGPGSEPATSGSETPGTSES ATPESGPGTSTEPSEGSAPGSPAGSPTSTEEGTSESATPESGPGSEPATSGSE | 724 |
| | TPGTSESATPESGPGSPAGSPTSTEEGSPAGSPTSTEEGTSTEPSEGSAPGTS ESATPESGPGTSESATPESGPGTSESATPESGPGSEPATSGSETPGSEPATSG SETPGSPAGSPTSTEEGTSTEPSEGSAPGTSTEPSEGSAPGSEPATSGSETPG TSESATPESGPGTSTEPSE | |
| AE292 | SPAGSPTSTEEGTSESATPESGPGTSTEPSEGSAPGTSESATPESGPGSEPAT SGSETPGTSESATPESGPGSEPATSGSETPGTSESATPESGPGTSTEPSEGSA PGSPAGSPTSTEEGTSESATPESGPGSEPATSGSETPGTSESATPESGPGSPA GSPTSTEEGSPAGSPTSTEEGTSTEPSEGSAPGTSESATPESGPGTSESATPE SGPGTSESATPESGPGSEPATSGSETPGSEPATSGSETPGSPAGSPTSTEEGT STEPSEGSAPGTSTEPSEGSAPGGSAP | 725 |
| AE864_2 | AGSPTSTEEGTSESATPESGPGTSTEPSEGSAPGSPAGSPTSTEEGTSTEPSE GSAPGTSTEPSEGSAPGTSESATPESGPGSEPATSGSETPGSEPATSGSETPG SPAGSPTSTEEGTSESATPESGPGTSTEPSEGSAPGTSTEPSEGSAPGSPAGS PTSTEEGTSTEPSEGSAPGTSTEPSEGSAPGTSESATPESGPGTSTEPSEGSA PGTSESATPESGPGSEPATSGSETPGTSTEPSEGSAPGTSTEPSEGSAPGTSE SATPESGPGTSESATPESGPGSPAGSPTSTEEGTSESATPESGPGSEPATSGS ETPGTSESATPESGPGTSTEPSEGSAPGTSTEPSEGSAPGTSTEPSEGSAPGT STEPSEGSAPGTSTEPSEGSAPGTSTEPSEGSAPGSPAGSPTSTEEGTSTEPS EGSAPGTSESATPESGPGSEPATSGSETPGTSESATPESGPGSEPATSGSETP GTSESATPESGPGTSTEPSEGSAPGTSESATPESGPGSPAGSPTSTEEGSPAG SPTSTEEGSPAGSPTSTEEGTSESATPESGPGTSTEPSEGSAPGTSESATPES GPGSEPATSGSETPGTSESATPESGPGSEPATSGSETPGTSESATPESGPGTS TEPSEGSAPGSPAGSPTSTEEGTSESATPESGPGSEPATSGSETPGTSESATP ESGPGSPAGSPTSTEEGSPAGSPTSTEEGTSTEPSEGSAPGTSESATPESGPG TSESATPESGPGTSESATPESGPGSEPATSGSETPGSEPATSGSETPGSPAGS PTSTEEGTSTEPSEGSAPGTSTEPSEGSAPGSEPATSGSETPGTSESATPESG PGTSTEPSEGAAEPEA | 726 |
| AE867 | GSPAGSPTSTEEGTSESATPESGPGTSTEPSEGSAPGSPAGSPTSTEEGTSTE PSEGSAPGTSTEPSEGSAPGTSESATPESGPGSEPATSGSETPGSEPATSGSE TPGSPAGSPTSTEEGTSESATPESGPGTSTEPSEGSAPGTSTEPSEGSAPGSP AGSPTSTEEGTSTEPSEGSAPGTSTEPSEGSAPGTSESATPESGPGTSTEPSE GSAPGTSESATPESGPGSEPATSGSETPGTSTEPSEGSAPGTSTEPSEGSAPG TSESATPESGPGTSESATPESGPGSPAGSPTSTEEGTSESATPESGPGSEPAT SGSETPGTSESATPESGPGTSTEPSEGSAPGTSTEPSEGSAPGTSTEPSEGSA PGTSTEPSEGSAPGTSTEPSEGSAPGTSTEPSEGSAPGSPAGSPTSTEEGTST EPSEGSAPGTSESATPESGPGSEPATSGSETPGTSESATPESGPGSEPATSGS ETPGTSESATPESGPGTSTEPSEGSAPGTSESATPESGPGSPAGSPTSTEEGS PAGSPTSTEEGSPAGSPTSTEEGTSESATPESGPGTSTEPSEGSAPGTSESAT PESGPGSEPATSGSETPGTSESATPESGPGSEPATSGSETPGTSESATPESGP GTSTEPSEGSAPGSPAGSPTSTEEGTSESATPESGPGSEPATSGSETPGTSES ATPESGPGSPAGSPTSTEEGSPAGSPTSTEEGTSTEPSEGSAPGTSESATPES GPGTSESATPESGPGTSESATPESGPGSEPATSGSETPGSEPATSGSETPGSP AGSPTSTEEGTSTEPSEGSAPGTSTEPSEGSAPGSEPATSGSETPGTSESATP ESGPGTSTEPSEGAAEPEA | 727 |
| AE867_2 | SPGSPAGSPTSTEEGTSESATPESGPGTSTEPSEGSAPGSPAGSPTSTEEGTS TEPSEGSAPGTSTEPSEGSAPGTSESATPESGPGSEPATSGSETPGSEPATSG SETPGSPAGSPTSTEEGTSESATPESGPGTSTEPSEGSAPGTSTEPSEGSAPG SPAGSPTSTEEGTSTEPSEGSAPGTSTEPSEGSAPGTSESATPESGPGTSTEP SEGSAPGTSESATPESGPGSEPATSGSETPGTSTEPSEGSAPGTSTEPSEGSA PGTSESATPESGPGTSESATPESGPGSPAGSPTSTEEGTSESATPESGPGSEP ATSGSETPGTSESATPESGPGTSTEPSEGSAPGTSTEPSEGSAPGTSTEPSEG SAPGTSTEPSEGSAPGTSTEPSEGSAPGTSTEPSEGSAPGSPAGSPTSTEEGT STEPSEGSAPGTSESATPESGPGSEPATSGSETPGTSESATPESGPGSEPATS GSETPGTSESATPESGPGTSTEPSEGSAPGTSESATPESGPGSPAGSPTSTEE GSPAGSPTSTEEGSPAGSPTSTEEGTSESATPESGPGTSTEPSEGSAPGTSES ATPESGPGSEPATSGSETPGTSESATPESGPGSEPATSGSETPGTSESATPES GPGTSTEPSEGSAPGSPAGSPTSTEEGTSESATPESGPGSEPATSGSETPGTS ESATPESGPGSPAGSPTSTEEGSPAGSPTSTEEGTSTEPSEGSAPGTSESATP | 728 |
| | ESGPGTSESATPESGPGTSESATPESGPGSEPATSGSETPGSEPATSGSETPG SPAGSPTSTEEGTSTEPSEGSAPGTSTEPSEGSAPGSEPATSGSETPGTSESA TPESGPGTSTEPSEGSAPG | |
| AE868 | PGSPAGSPTSTEEGTSESATPESGPGTSTEPSEGSAPGSPAGSPTSTEEGTST EPSEGSAPGTSTEPSEGSAPGTSESATPESGPGSEPATSGSETPGSEPATSGS ETPGSPAGSPTSTEEGTSESATPESGPGTSTEPSEGSAPGTSTEPSEGSAPGS PAGSPTSTEEGTSTEPSEGSAPGTSTEPSEGSAPGTSESATPESGPGTSTEPS EGSAPGTSESATPESGPGSEPATSGSETPGTSTEPSEGSAPGTSTEPSEGSAP GTSESATPESGPGTSESATPESGPGSPAGSPTSTEEGTSESATPESGPGSEPA TSGSETPGTSESATPESGPGTSTEPSEGSAPGTSTEPSEGSAPGTSTEPSEGS APGTSTEPSEGSAPGTSTEPSEGSAPGTSTEPSEGSAPGSPAGSPTSTEEGTS TEPSEGSAPGTSESATPESGPGSEPATSGSETPGTSESATPESGPGSEPATSG SETPGTSESATPESGPGTSTEPSEGSAPGTSESATPESGPGSPAGSPTSTEEG SPAGSPTSTEEGSPAGSPTSTEEGTSESATPESGPGTSTEPSEGSAPGTSESA TPESGPGSEPATSGSETPGTSESATPESGPGSEPATSGSETPGTSESATPESG PGTSTEPSEGSAPGSPAGSPTSTEEGTSESATPESGPGSEPATSGSETPGTSE SATPESGPGSPAGSPTSTEEGSPAGSPTSTEEGTSTEPSEGSAPGTSESATPE SGPGTSESATPESGPGTSESATPESGPGSEPATSGSETPGSEPATSGSETPGS PAGSPTSTEEGTSTEPSEGSAPGTSTEPSEGSAPGSEPATSGSETPGTSESAT PESGPGTSTEPSEGAAEPEA | 729 |
| AE144_7 A | GSPAGSPTSTEEGTSESATPESGPGTSTEPSEGSAPGSPAGSPTSTEEGTSTE PSEGSAPGTSTEPSEGSAPGTSESATPESGPGSEPATSGSETPGSEPATSGSE TPGSPAGSPTSTEEGTSESATPESGPGTSTEPSEGSAP | 730 |
| AE292 | SPAGSPTSTEEGTSESATPESGPGTSTEPSEGSAPGTSESATPESGPGSEPAT SGSETPGTSESATPESGPGSEPATSGSETPGTSESATPESGPGTSTEPSEGSA PGSPAGSPTSTEEGTSESATPESGPGSEPATSGSETPGTSESATPESGPGSPA GSPTSTEEGSPAGSPTSTEEGTSTEPSEGSAPGTSESATPESGPGTSESATPE SGPGTSESATPESGPGSEPATSGSETPGSEPATSGSETPGSPAGSPTSTEEGT STEPSEGSAPGTSTEPSEGSAPGGSAP | 731 |
| AE293 | PGSPAGSPTSTEEGTSESATPESGPGTSTEPSEGSAPGSPAGSPTSTEEGTST EPSEGSAPGTSTEPSEGSAPGTSESATPESGPGSEPATSGSETPGSEPATSGS ETPGSPAGSPTSTEEGTSESATPESGPGTSTEPSEGSAPGTSTEPSEGSAPGS PAGSPTSTEEGTSTEPSEGSAPGTSTEPSEGSAPGTSESATPESGPGTSTEPS EGSAPGTSESATPESGPGSEPATSGSETPGTSTEPSEGSAPGTSTEPSEGSAP GTSESATPESGPGTSESATPEGAAEPEA | 732 |
| AE300 | PGSPAGSPTSTEEGTSESATPESGPGTSTEPSEGSAPGSPAGSPTSTEEGTST EPSEGSAPGTSTEPSEGSAPGTSESATPESGPGSEPATSGSETPGSEPATSGS ETPGSPAGSPTSTEEGTSESATPESGPGTSTEPSEGSAPGTSTEPSEGSAPGS PAGSPTSTEEGTSTEPSEGSAPGTSTEPSEGSAPGTSESATPESGPGTSTEPS EGSAPGTSESATPESGPGSEPATSGSETPGTSTEPSEGSAPGTSTEPSEGSAP GTSESATPESGPGTSESATPESGPGSPAGAAEPEA | 733 |
| AE584 | PGSPAGSPTSTEEGTSESATPESGPGTSTEPSEGSAPGSPAGSPTSTEEGTST EPSEGSAPGTSTEPSEGSAPGTSESATPESGPGSEPATSGSETPGSEPATSGS ETPGSPAGSPTSTEEGTSESATPESGPGTSTEPSEGSAPGTSTEPSEGSAPGS PAGSPTSTEEGTSTEPSEGSAPGTSTEPSEGSAPGTSESATPESGPGTSTEPS EGSAPGTSESATPESGPGSEPATSGSETPGTSTEPSEGSAPGTSTEPSEGSAP GTSESATPESGPGTSESATPESGPGSPAGSPTSTEEGTSESATPESGPGSEPA TSGSETPGTSESATPESGPGTSTEPSEGSAPGTSTEPSEGSAPGTSTEPSEGS APGTSTEPSEGSAPGTSTEPSEGSAPGTSTEPSEGSAPGSPAGSPTSTEEGTS TEPSEGSAPGTSESATPESGPGSEPATSGSETPGTSESATPESGPGSEPATSG SETPGTSESATPESGPGTSTEPSEGSAPGTSESATPESGPGSPAGSPTSTEEG SPAGSPTSTEEGSPAGSPTSTEEGTSESATPESGPGTSTEPSEGSAPGAAEPE A | 734 |

[0171] The disclosure contemplates compositions of any of the embodiments described herein comprising XTEN of intermediate lengths to those of Table 7, as well as XTEN of longer lengths than those of Table 7, such as those in which motifs of 12 amino acids of Table 6 are added to the N- or C- terminus of an XTEN of Table 7.

[0172] In another embodiment, the disclosure contemplates polypeptide compositions of any of the embodiments described herein comprising an XTEN1 and an XTEN2 that can further comprise a His tag of HHHHHH (SEQ ID NO: 794) or HHHHHHHH (SEQ ID NO: 795) at the N-terminus and/or the sequence EPEA (SEQ ID NO: 796) at the C-terminus, respectively, of the polypeptide composition to facilitate the purification of the composition to at least 90%, 91%, 92%, 93%, 94%, 95%, 96%, 97%, 98%, or at least 99% purity by chromatography methods known in the art, including but not limited to IMAC chromatography, C-tagXL affinity matrix, and other such methods, including but not limited to those described in the Examples, below.

[0173] Additional examples of XTEN sequences that can be used according to the present disclosure and are disclosed in U.S. Pat. Publication Nos. 2010/0239554 A1, 2010/0323956 A1, 2011/0046060 A1, 2011/0046061 A1, 2011/0077199 A1, or 2011/0172146 A1, or International Pat. Publication Nos. WO 2010091122 A1, WO 2010144502 A2, WO 2010144508 A1, WO 2011028228 A1, WO 2011028229 A1, WO 2011028344 A2, WO 2014/011819 A2, or WO 2015/023891.

### V). CD3 Cell Antigen Binding Fragments

[0174] In another aspect, the disclosure relates to antigen binding fragments (AF2) having specific binding affinity for an effector cell antigen that can be incorporated into any of the subject composition embodiments described herein. In some cases, the effector cell antigen is expressed on the surface of an effector cell selected from a plasma cell, a T cell, a B cell, a cytokine induced killer cell (CIK cell), a mast cell, a dendritic cell, a regulatory T cell (RegT cell), a helper T cell, a myeloid cell, and a NK cell.

[0175] Various AF2 that bind effector cell antigens have particular utility for pairing with an antigen binding fragment with binding affinity to EGFR antigens associated with a diseased cell or tissue in composition formats in order to effect cell killing of the diseased cell or tissue. Binding specificity can be determined by complementarity determining regions, or CDRs, such as light chain CDRs or heavy chain CDRs. In many cases, binding specificity is determined by light chain CDRs and heavy chain CDRs. A given combination of heavy chain CDRs and light chain CDRs provides a given binding pocket that confers greater affinity and/or specificity towards an effector cell antigen as compared to other reference antigens. The resulting bispecific compositions, having a first antigen binding fragment (AF1) to EGFR linked by a short, flexible peptide linker to a second antigen binding fragment (AF2) with binding specificity to an effector cell antigen are bispecific, with each antigen binding fragment having specific binding affinity to their respective ligands. It will be understood that in such compositions, an AF1 directed against an EGFR of a disease tissue is used in combination with a AF2 directed towards an effector cell marker in order to bring an effector cell in close proximity to the cell of a disease tissue in order to effect the cytolysis of the cell of the diseased tissue. Further, the AF1 and AF2 are incorporated into the specifically designed polypeptides comprising cleavable release segments and XTEN in order to confer prodrug characteristics on the compositions that becomes activated by release of the fused AF1 and AF2 upon the cleavage of the release segments when in proximity to the disease tissue having proteases capable of cleaving the release segments in one or more locations in the release segment sequence.

[0176] In one embodiment, the AF2 of the subject compositions has binding affinity for an effector cell antigen expressed on the surface of a T cell. In another embodiment, the AF2 of the subject compositions has binding affinity for CD3. In another embodiment, the AF2 of the subject compositions has binding affinity for a member of the CD3 complex, which includes in individual form or independently combined form all known CD3 subunits of the CD3 complex; for example, CD3 epsilon, CD3 delta, CD3 gamma, CD3 zeta, CD3 alpha and CD3 beta. In another embodiment, the AF2 has binding affinity for CD3 epsilon, CD3 delta, CD3 gamma, CD3 zeta, CD3 alpha or CD3 beta.

[0177] The origin of the antigen binding fragments contemplated by the disclosure can be derived from a naturally occurring antibody or fragment thereof, a non-naturally occurring antibody or fragment thereof, a humanized antibody or fragment thereof, a synthetic antibody or fragment thereof, a hybrid antibody or fragment thereof, or an engineered antibody or fragment thereof. Methods for generating an antibody for a given target marker are well known in the art. For example, the monoclonal antibodies may be made using the hybridoma method first described by Kohler et al., Nature, 256:495 (1975), or may be made by recombinant DNA methods (U.S. Pat. No. 4,816,567). The structure of antibodies and fragments thereof, variable regions of heavy and light chains of an antibody (VH and VL), single chain variable regions (scFv), complementarity determining regions (CDR), and domain antibodies (dAbs) are well understood. Methods for generating a polypeptide having a desired antigen binding fragment with binding affinity to a given antigen are known in the art.

[0178] It will be understood that use of the term antigen binding fragments for the composition embodiments disclosed herein is intended to include portions or fragments of antibodies that retain the ability to bind the antigens that are the ligands of the corresponding intact antibody. In such embodiments, the antigen binding fragment can be, but is not limited to, CDRs and intervening framework regions, variable or hypervariable regions of light and/or heavy chains of an antibody (VL, VH), variable fragments (Fv), Fab′ fragments, F(ab′)2 fragments, Fab fragments, single chain antibodies (scAb), VHH camelid antibodies, single chain variable fragment (scFv), linear antibodies, a single domain antibody, complementarity determining regions (CDR), domain antibodies (dAbs), single domain heavy chain immunoglobulins of the BHH or BNAR type, single domain light chain immunoglobulins, or other polypeptides known in the art containing a fragment of an antibody capable of binding an antigen. The antigen binding fragments having CDR-H and CDR-L can be configured in a (CDR-H)-(CDR-L) or a (CDR-H)-(CDR-L) orientation, N-terminus to C-terminus. The VL and VH of two antigen binding fragments can also be configured in a single chain diabody configuration; i.e., the VL and VH of the AF1 and AF2 configured with linkers of an appropriate length to permit arrangement as a diabody.

[0179] Various CD3 binding AF2 of the disclosure have been specifically modified to enhance their stability in the polypeptide embodiments described herein. Protein aggregation of antibodies continues to be a significant problem in their developability and remains a major area of focus in antibody production. Antibody aggregation can be triggered by partial unfolding of its domains, leading to monomer-monomer association followed by nucleation and aggregate growth. Although the aggregation propensities of antibodies and antibody-based proteins can be affected by the external experimental conditions, they are strongly dependent on the intrinsic antibody properties as determined by their sequences and structures. Although it is well known that proteins are only marginally stable in their folded states, it is often less well appreciated that most proteins are inherently aggregation-prone in their unfolded or partially unfolded states, and the resulting aggregates can be extremely stable and long-lived. Reduction in aggregation propensity has also been shown to be accompanied by an increase in expression titer, showing that reducing protein aggregation is beneficial throughout the development process and can lead to a more efficient path to clinical studies. For therapeutic proteins, aggregates are a significant risk factor for deleterious immune responses in patients, and can form via a variety of mechanisms. Controlling aggregation can improve protein stability, manufacturability, attrition rates, safety, formulation, titers, immunogenicity, and solubility. The intrinsic properties of proteins such as size, hydrophobicity, electrostatics and charge distribution play important roles in protein solubility. Low solubility of therapeutic proteins due to surface hydrophobicity has been shown to render formulation development more difficult and may lead to poor biodistribution, undesirable pharmacokinetics behavior and immunogenicity in vivo. Decreasing the overall surface hydrophobicity of candidate monoclonal antibodies can also provide benefits and cost savings relating to purification and dosing regimens. Individual amino acids can be identified by structural analysis as being contributory to aggregation potential in an antibody, and can be located in CDR as well as framework regions. In particular, residues can be predicted to be at high risk of causing hydrophobicity issues in a given antibody. In one embodiment, the present disclosure provides an AF2 having the capability to specifically bind CD3 in which the AF2 has at least one amino acid substitution of a hydrophobic amino acid in a framework region relative to the parental antibody or antibody fragment wherein the hydrophobic amino acid is selected from isoleucine, leucine or methionine. In another embodiment, the CD3 AF2 has at least two amino acid substitutions of hydrophobic amino acids in one or more framework regions wherein the hydrophobic amino acids are selected from isoleucine, leucine or methionine.

[0180] The isoelectric point (pI) is the pH at which the antibody or antibody fragment has no net electrical charge. If the pH is below the pI of an antibody or antibody fragment, then it will have a net positive charge. A greater positive charge tends to correlate with increased blood clearance and tissue retention, with a generally shorter half-life. If the pH is greater than the pI of an antibody or antibody fragment it will have a negative charge. A negative charge generally results in decreased tissue uptake and a longer half-life. It is possible to manipulate this charge through mutations to the framework residues. These considerations informed the design of the sequences of the AF2 of the embodiments described herein wherein individual amino acid substitutions were made relative to the parental antibody utilized as the starting point. The isoelectric point of a polypeptide can be determined mathematically (e.g., computationally) or experimentally in an in vitro assay. The isoelectric point (pI) is the pH at which a protein has a net charge of zero and can be calculated using the charges for the specific amino acids in the protein sequence. Estimated values for the charges are called acid dissociation constants or pKa values and are used to calculate the pI. The pI can be determined in vitro by methods such as capillary isoelectric focusing (see Datta-Mannan, A., et al. The interplay of non-specific binding, target-mediated clearance and FcRn interactions on the pharmacokinetics of humanized antibodies. mAbs 7:1084 (2015); Li, B., et al. Framework selection can influence pharmacokinetics of a humanized therapeutic antibody through differences in molecule charge. mAbs 6, 1255-1264 (2014)) or other methods known in the art. In some embodiments, the isoelectric points of the AF1 and AF2 are designed to be within a particular range of each other, thereby promoting stability.

[0181] In one embodiment, the present disclosure provides an AF2 for use in any of the polypeptide embodiments described herein comprising CDR-L and CDR-H, wherein the AF2 (a) specifically binds to cluster of differentiation 3 T cell receptor (CD3); and (b) comprises CDR-H1, CDR-H2, and CDR-H3, having amino acid sequences of SEQ ID NOS: 742, 743, and 744, respectively. In another embodiment, the present disclosure provides an AF2 for use in any of the polypeptide embodiments described herein comprising CDR-L and CDR-H, wherein the AF2 (a) specifically binds to cluster of differentiation 3 T cell receptor (CD3); (b) comprises CDR-H1, CDR-H2, and CDR-H3, having amino acid sequences of SEQ ID NOS: 742, 743, and 744, respectively; and (c) comprises CDR-L wherein the CDR-L comprises a CDR-L1 having an amino acid sequence of SEQ ID NOS: 735 or 736, a CDR-L2 having an amino acid sequence of SEQ ID NOS: 738 or 739, and a CDR-L3 having an amino acid sequence of SEQ ID NO:740. In another embodiment, the foregoing AF2 embodiments of the paragraph further comprises light chain framework regions (FR-L) and heavy chain framework regions (FR-H) wherein AF2 comprises a FR-L1 exhibiting at least 86%, 87%, 88%, 89%, 90%, 91%, 92%, 93%, 94%, 95%, 96%, 97%, 98%, 99% sequence identity or is identical to the amino acid sequence of SEQ ID NO:746, a FR-L2 exhibiting at least 86%, 87%, 88%, 89%, 90%, 91%, 92%, 93%, 94%, 95%, 96%, 97%, 98%, 99% sequence identity or is identical to the amino acid sequence of SEQ ID NO:747, a FR-L3 exhibiting at least 86%, 87%, 88%, 89%, 90%, 91%, 92%, 93%, 94%, 95%, 96%, 97%, 98%, 99% sequence identity or is identical to the amino acid sequence of any one of SEQ ID NOS:748-751, a FR-L4 exhibiting at least 86%, 87%, 88%, 89%, 90%, 91%, 92%, 93%, 94%, 95%, 96%, 97%, 98%, 99% sequence identity or is identical to the amino acid sequence of SEQ ID NO:754, a FR-H1 exhibiting at least 86%, 87%, 88%, 89%, 90%, 91%, 92%, 93%, 94%, 95%, 96%, 97%, 98%, 99% sequence identity or is identical to the amino acid sequence of SEQ ID NO:755 or SEQ ID NO:756, a FR-H2 exhibiting at least 86%, 87%, 88%, 89%, 90%, 91%, 92%, 93%, 94%, 95%, 96%, 97%, 98%, 99% sequence identity or is identical to the amino acid sequence of SEQ ID NO:759, a FR-H3 exhibiting at least 86%, 87%, 88%, 89%, 90%, 91%, 92%, 93%, 94%, 95%, 96%, 97%, 98%, 99% sequence identity or is identical to the amino acid sequence of SEQ ID NO:760; and a FR-H4 exhibiting at least 86%, 87%, 88%, 89%, 90%, 91%, 92%, 93%, 94%, 95%, 96%, 97%, 98%, 99% sequence identity or is identical to the amino acid sequence of SEQ ID NO:764. In another embodiment, the AF2 for use in any of the polypeptide embodiments described herein comprises light chain framework regions (FR-L) and heavy chain framework regions (FR-H) wherein AF2 comprises a FR-L1 exhibiting at least 86%, 87%, 88%, 89%, 90%, 91%, 92%, 93%, 94%, 95%, 96%, 97%, 98%, 99% sequence identity or is identical to the amino acid sequence of SEQ ID NO:746, a FR-L2 exhibiting at least 86%, 87%, 88%, 89%, 90%, 91%, 92%, 93%, 94%, 95%, 96%, 97%, 98%, 99% sequence identity or is identical to the amino acid sequence of SEQ ID NO:747, a FR-L3 exhibiting at least 86%, 87%, 88%, 89%, 90%, 91%, 92%, 93%, 94%, 95%, 96%, 97%, 98%, 99% sequence identity or is identical to the amino acid sequence of SEQ ID NO:748, FR-L4 exhibiting at least 86%, 87%, 88%, 89%, 90%, 91%, 92%, 93%, 94%, 95%, 96%, 97%, 98%, 99% sequence identity or is identical to the amino acid sequence of SEQ ID NO:754, a FR-H1 exhibiting at least 86%, 87%, 88%, 89%, 90%, 91%, 92%, 93%, 94%, 95%, 96%, 97%, 98%, 99% sequence identity or is identical to the amino acid sequence of SEQ ID NO:755, a FR-H2 exhibiting at least 86%, 87%, 88%, 89%, 90%, 91%, 92%, 93%, 94%, 95%, 96%, 97%, 98%, 99% sequence identity or is identical to the amino acid sequence of SEQ ID NO:759, a FR-H3 exhibiting at least 86%, 87%, 88%, 89%, 90%, 91%, 92%, 93%, 94%, 95%, 96%, 97%, 98%, 99% sequence identity or is identical to the amino acid sequence of SEQ ID NO:760; and a FR-H4 exhibiting at least 86%, 87%, 88%, 89%, 90%, 91%, 92%, 93%, 94%, 95%, 96%, 97%, 98%, 99% sequence identity or is identical to the amino acid sequence of SEQ ID NO:764. In another embodiment, the AF2 for use in any of the polypeptide embodiments described herein comprises light chain framework regions (FR-L) and heavy chain framework regions (FR-H) wherein AF2 comprises a FR-L1 exhibiting at least 86%, 87%, 88%, 89%, 90%, 91%, 92%, 93%, 94%, 95%, 96%, 97%, 98%, 99% sequence identity or is identical to the amino acid sequence of SEQ ID NO:746, a FR-L2 exhibiting at least 86%, 87%, 88%, 89%, 90%, 91%, 92%, 93%, 94%, 95%, 96%, 97%, 98%, 99% sequence identity or is identical to the amino acid sequence of SEQ ID NO:747, a FR-L3 exhibiting at least 86%, 87%, 88%, 89%, 90%, 91%, 92%, 93%, 94%, 95%, 96%, 97%, 98%, 99% sequence identity or is identical to the amino acid sequence of SEQ ID NO:749, a FR-L4 exhibiting at least 86%, 87%, 88%, 89%, 90%, 91%, 92%, 93%, 94%, 95%, 96%, 97%, 98%, 99% sequence identity or is identical to the amino acid sequence of SEQ ID NO:754, a FR-H1 exhibiting at least 86%, 87%, 88%, 89%, 90%, 91%, 92%, 93%, 94%, 95%, 96%, 97%, 98%, 99% sequence identity or is identical to the amino acid sequence of SEQ ID NO:755, a FR-H2 exhibiting at least 86%, 87%, 88%, 89%, 90%, 91%, 92%, 93%, 94%, 95%, 96%, 97%, 98%, 99% sequence identity or is identical to the amino acid sequence of SEQ ID NO:759, a FR-H3 exhibiting at least 86%, 87%, 88%, 89%, 90%, 91%, 92%, 93%, 94%, 95%, 96%, 97%, 98%, 99% sequence identity or is identical to the amino acid sequence of SEQ ID NO:760; and a FR-H4 exhibiting at least 86%, 87%, 88%, 89%, 90%, 91%, 92%, 93%, 94%, 95%, 96%, 97%, 98%, 99% sequence identity or is identical to the amino acid sequence of SEQ ID NO:764. In another embodiment, the AF2 of the subject polypeptide embodiments described herein comprises light chain framework regions (FR-L) and heavy chain framework regions (FR-H) wherein AF2 comprises a FR-L1 exhibiting at least 86%, 87%, 88%, 89%, 90%, 91%, 92%, 93%, 94%, 95%, 96%, 97%, 98%, 99% sequence identity or is identical to the amino acid sequence of SEQ ID NO:746, a FR-L2 exhibiting at least 86%, 87%, 88%, 89%, 90%, 91%, 92%, 93%, 94%, 95%, 96%, 97%, 98%, 99% sequence identity or is identical to the amino acid sequence of SEQ ID NO:747, a FR-L3 exhibiting at least 86%, 87%, 88%, 89%, 90%, 91%, 92%, 93%, 94%, 95%, 96%, 97%, 98%, 99% sequence identity or is identical to the amino acid sequence of SEQ ID NO:750, a FR-L4 exhibiting at least 86%, 87%, 88%, 89%, 90%, 91%, 92%, 93%, 94%, 95%, 96%, 97%, 98%, 99% sequence identity or is identical to the amino acid sequence of SEQ ID NO:754, a FR-H1 exhibiting at least 86%, 87%, 88%, 89%, 90%, 91%, 92%, 93%, 94%, 95%, 96%, 97%, 98%, 99% sequence identity or is identical to the amino acid sequence of SEQ ID NO:755, a FR-H2 exhibiting at least 86%, 87%, 88%, 89%, 90%, 91%, 92%, 93%, 94%, 95%, 96%, 97%, 98%, 99% sequence identity or is identical to the amino acid sequence of SEQ ID NO:759, a FR-H3 exhibiting at least 86%, 87%, 88%, 89%, 90%, 91%, 92%, 93%, 94%, 95%, 96%, 97%, 98%, 99% sequence identity or is identical to the amino acid sequence of SEQ ID NO:760, and a FR-H4 exhibiting at least 86%, 87%, 88%, 89%, 90%, 91%, 92%, 93%, 94%, 95%, 96%, 97%, 98%, 99% sequence identity or is identical to the amino acid sequence of SEQ ID NO:764. In another embodiment, the AF2 of the subject polypeptide embodiments described herein comprises light chain framework regions (FR-L) and heavy chain framework regions (FR-H) wherein AF2 comprises a FR-L1 exhibiting at least 86%, 87%, 88%, 89%, 90%, 91%, 92%, 93%, 94%, 95%, 96%, 97%, 98%, 99% sequence identity or is identical to the amino acid sequence of SEQ ID NO:746, a FR-L2 exhibiting at least 86%, 87%, 88%, 89%, 90%, 91%, 92%, 93%, 94%, 95%, 96%, 97%, 98%, 99% sequence identity or is identical to the amino acid sequence of SEQ ID NO:747, a FR-L3 exhibiting at least 86%, 87%, 88%, 89%, 90%, 91%, 92%, 93%, 94%, 95%, 96%, 97%, 98%, 99% sequence identity or is identical to the amino acid sequence of SEQ ID NO:751, a FR-L4 exhibiting at least 86%, 87%, 88%, 89%, 90%, 91%, 92%, 93%, 94%, 95%, 96%, 97%, 98%, 99% sequence identity or is identical to the amino acid sequence of SEQ ID NO:754, a FR-H1 exhibiting at least 86%, 87%, 88%, 89%, 90%, 91%, 92%, 93%, 94%, 95%, 96%, 97%, 98%, 99% sequence identity or is identical to the amino acid sequence of SEQ ID NO:756, a FR-H2 exhibiting at least 86%, 87%, 88%, 89%, 90%, 91%, 92%, 93%, 94%, 95%, 96%, 97%, 98%, 99% sequence identity or is identical to the amino acid sequence of SEQ ID NO:759, a FR-H3 exhibiting at least 86%, 87%, 88%, 89%, 90%, 91%, 92%, 93%, 94%, 95%, 96%, 97%, 98%, 99% sequence identity or is identical to the amino acid sequence of SEQ ID NO:760, and a FR-H4 exhibiting at least 86%, 87%, 88%, 89%, 90%, 91%, 92%, 93%, 94%, 95%, 96%, 97%, 98%, 99% sequence identity or is identical to the amino acid sequence of SEQ ID NO:764.

[0182] In another embodiment, the present disclosure provides an AF2 for use in any of the polypeptide embodiments described herein wherein the AF2 comprises a variable heavy (VH) amino acid sequence having at least 90%, 91%, 92%, 93%, 94%, 95%, 96%, 97%, 98%, 99% sequence identity or is identical to an amino acid sequence of SEQ ID NO:766 or SEQ ID NO:769. In another embodiment, the present disclosure provides an AF2 for use in any of the polypeptide embodiments described herein wherein the AF2 comprises a variable light (VL) amino acid sequence having at least 90%, 91%, 92%, 93%, 94%, 95%, 96%, 97%, 98%, 99% sequence identity or is identical to an amino acid sequence of any one of SEQ ID NOS: 765, 767, 768, 770, or 771. In another embodiment, the present disclosure provides an AF2 for use in any of the polypeptide embodiments described herein wherein the AF2 comprises a variable heavy (VH) amino acid sequence having at least 90%, 91%, 92%, 93%, 94%, 95%, 96%, 97%, 98%, 99% sequence identity or is identical to an amino acid sequence of SEQ ID NO:766 or SEQ ID NO:769 and a variable light (VL) amino acid sequence having at least 90%, 91%, 92%, 93%, 94%, 95%, 96%, 97%, 98%, 99% sequence identity or is identical to an amino acid sequence of any one of SEQ ID NOS: 765, 767, 768, 770, or 771.

[0183] In another embodiment, the present disclosure provides an AF2 for use in any of the polypeptide embodiments described herein wherein the AF2 comprises an amino acid sequence having at least 95%, 96%, 97%, 98%, 99% sequence identity or is identical to an amino acid sequence of any one of SEQ ID NOS:776-780.

[0184] In another aspect, the present disclosure provides AF2 antigen binding fragments that bind to the CD3 protein complex that have enhanced stability compared to CD3 binding antibodies or antigen binding fragments known in the art. Additionally, the CD3 antigen binding fragments of the disclosure are designed to confer a higher degree of stability on the chimeric bispecific antigen binding fragment compositions into which they are integrated, leading to improved expression and recovery of the fusion protein, increased shelf-life and enhanced stability when administered to a subject. In one approach, the CD3 AF2 of the present disclosure are designed to have a higher degree of thermal stability compared to certain CD3-binding antibodies and antigen binding fragments known in the art. As a result, the CD3 AF2 utilized as components of the chimeric bispecific antigen binding fragment compositions into which they are integrated exhibit favorable pharmaceutical properties, including high thermostability and low aggregation propensity, resulting in improved expression and recovery during manufacturing and storage, as well promoting long serum half-life. Biophysical properties such as thermostability are often limited by the antibody variable domains, which differ greatly in their intrinsic properties. High thermal stability is often associated with high expression levels and other desired properties, including being less susceptible to aggregation (Buchanan A, et al. Engineering a therapeutic IgG molecule to address cysteinylation, aggregation and enhance thermal stability and expression. MAbs 2013; 5:255). Thermal stability is determined by measuring the “melting temperature” (Tₘ), which is defined as the temperature at which half of the molecules are denatured. The melting temperature of each heterodimer is indicative of its thermal stability. In vitro assays to determine Tₘ are known in the art, including methods described in the Examples, below. The melting point of the heterodimer may be measured using techniques such as differential scanning calorimetry (Chen et al (2003) Pharm Res 20:1952-60; Ghirlando et al (1999) Immunol Lett 68:47-52). Alternatively, the thermal stability of the heterodimer may be measured using circular dichroism (Murray et al. (2002) J. Chromatogr Sci 40:343-9), or as described in the Examples, below.

[0185] Thermal denaturation curves of the CD3 binding fragments and the anti-CD3 bispecific antibodies comprising said anti-CD3 binding fragment and a reference binding of the present disclosure show that the constructs of the present disclosure are more resistant to thermal denaturation than the antigen binding fragment consisting of a sequence shown in SEQ ID NO:781 or a control bispecific antibody wherein said control bispecific antigen binding fragment comprises SEQ ID NO:781 and a reference antigen binding fragment that binds to an EGFR embodiment described herein. In one embodiment, the polypeptides of any of the subject composition embodiments described herein comprise an anti-CD3 AF2 of the embodiments described herein, wherein the Tₘ of the AF2 is at least 2° C. greater, or at least 3° C. greater, or at least 4° C. greater, or at least 5° C. greater, or at least 6° C. greater, or at least 7° C. greater, or at least 8° C. greater, or at least 9° C. greater, or at least 10° C. greater than the Tₘ of an antigen binding fragment consisting of a sequence of SEQ ID NO:781, as determined by an increase in melting temperature in an in vitro assay.

[0186] In another embodiment, the polypeptides of any of the subject composition embodiments described herein comprise an AF2 that specifically binds human or cyno CD3 with a dissociation constant (K_{d}) constant between about 10 nM and about 400 nM, or between about 50 nM and about 350 nM, or between about 100 nM and 300 nM, as determined in an in vitro antigen-binding assay comprising a human or cyno CD3 antigen. In another embodiment, the polypeptides of any of the subject composition embodiments described herein comprise an AF2 that specifically binds human or cyno CD3 with a dissociation constant (K_{d}) weaker than about 10 nM, or about 50 nM, or about 100 nM, or about 150 nM, or about 200 nM, or about 250 nM, or about 300 nM, or about 350 nM, or weaker than about 400 nM as determined in an in vitro antigen-binding assay. For clarity, an antigen binding fragment with a K_{d} of 400 binds its ligand more weakly than one with a K_{d} of 10 nM. In another embodiment, the polypeptides of any of the subject composition embodiments described herein comprise an AF2 that specifically binds human or cyno CD3 with at least 2-fold, 3-fold, 4-fold, 5-fold, 6-fold, 7-fold, 8-fold, 9-fold, or at least 10-fold weaker binding affinity than an antigen binding fragment consisting of an amino acid sequence of SEQ ID NO: 781, as determined by the respective dissociation constants (K_{d}) in an in vitro antigen-binding assays. In another embodiment, the present disclosure provides bispecific polypeptides comprising an AF2 that exhibits a binding affinity to CD3 that is at least 2-fold, 3-fold, 4-fold, 5-fold, 6-fold, 7-fold, 8-fold, 9-fold, 10-fold, 20-fold, 50-fold, 100-fold, or at least 1000-fold at weaker relative to that of the AF1 EGFR embodiments described herein that are incorporated into the subject polypeptides, as determined by the respective dissociation constants (K_{d}) in an in vitro antigen-binding assay. The binding affinity of the subject compositions for the target ligands can be assayed using binding or competitive binding assays, such as Biacore assays with chip-bound receptors or binding proteins or ELISA assays, as described in U.S. Pat. 5,534,617, assays described in the Examples herein, radio-receptor assays, or other assays known in the art. The binding affinity constant can then be determined using standard methods, such as Scatchard analysis, as described by van Zoelen, et al., Trends Pharmacol Sciences (1998) 19)12):487, or other methods known in the art.

[0187] In a related aspect, the present disclosure provides AF2 that bind to CD3 and are incorporated into chimeric, bispecific polypeptide compositions that are designed to have an isoelectric point (pI) that confer enhanced stability on the compositions of the disclosure compared to corresponding compositions comprising CD3 binding antibodies or antigen binding fragments known in the art. In one embodiment, the polypeptides of any of the subject composition embodiments described herein comprise AF2 that bind to CD3 wherein the AF2 exhibits a pI that is between 6.0 and 6.6, inclusive. In another embodiment, the polypeptides of any of the subject composition embodiments described herein comprise AF2 that bind to CD3 wherein the AF2 exhibits a pI that is at least 0.1, 0.2, 0.3, 0.4, 0.5, 0.6, 0.7, 0.8, 0.9, or 1.0 pH unit lower than the pI of a reference antigen binding fragment consisting of a sequence shown in SEQ ID NO: 781. In another embodiment, the polypeptides of any of the subject composition embodiments described herein comprise an AF2 that binds to CD3 fused to an AF1 that binds to an EGFR antigen wherein the AF2 exhibits a pI that is within at least 0.1, 0.2, 0.3, 0.4, 0.5, 0.6, 0.7, 0.8, 0.9, 1.0, 1.1, 1.2, 1.3, 1.4, or 1.5 pH units of the pI of the AF1 that binds EGFR antigen or an epitope thereof. In another embodiment, the polypeptides of any of the subject composition embodiments described herein comprise an AF2 that binds to CD3 fused to an AF1 that binds to an EGFR antigen wherein the AF2 exhibits a pI that is within at least about 0.1 to about 1.5, or at least about 0.3 to about 1.2, or at least about 0.5 to about 1.0, or at least about 0.7 to about 0.9 pH units of the pI of the AF1. It is specifically intended that by such design wherein the pI of the two antigen binding fragments are within such ranges, the resulting fused antigen binding fragments will confer a higher degree of stability on the chimeric bispecific antigen binding fragment compositions into which they are integrated, leading to improved expression and enhanced recovery of the fusion protein in soluble, non-aggregated form, increased shelf-life of the formulated chimeric bispecific polypeptide compositions, and enhanced stability when the composition is administered to a subject. State differently, having the AF2 and the AF1 within a relatively narrow pI range of may allow for the selection of a buffer or other solution in which both the AF2 and AF1 are stable, thereby promoting overall stability of the composition.

[0188] In certain embodiments, the VL and VH of the antigen binding fragments are fused by relatively long linkers, consisting 25, 26, 27, 28, 29, 30, 31, 32, 33, 34, or 35 hydrophilic amino acids that, when joined together, have a flexible characteristic. In one embodiment, the VL and VH of any of the scFv embodiments described herein are linked by relatively long linkers of hydrophilic amino acids selected from the sequences

GSGEGSEGEGGGEGSEGEGSGEGGEGEGSG (SEQ ID NO: 790),

TGSGEGSEGEGGGEGSEGEGSGEGGEGEGSGT (SEQ ID NO: 791),

GATPPETGAETESPGETTGGSAESEPPGEG (SEQ ID NO: 792), o
r

GSAAPTAGTTPSASPAPPTGGSSAAGSPST (SEQ ID NO: 793).

In another embodiment, the AF1 and AF2 are linked together by a short linker of hydrophilic amino acids having 3, 4, 5, 6, or 7 amino acids. In one embodiment, the short linker sequences are selected from the group of sequences SGGGGS (SEQ ID NO: 797), GGGGS (SEQ ID NO: 798), GGSGGS (SEQ ID NO: 799), GGS, or GSP. In another embodiment, the disclosure provides compositions comprising a single chain diabody in which after folding, the first domain (VL or VH) is paired with the last domain (VH or VL) to form one scFv and the two domains in the middle are paired to form the other scFv in which the first and second domains, as well as the third and last domains, are fused together by one of the foregoing short linkers and the second and the third variable domains are fused by one of the foregoing relatively long linkers. As will be appreciated by one of skill in the art, the selection of the short linker and relatively long linker is to prevent the incorrect pairing of adj acent variable domains, thereby facilitating the formation of the single chain diabody configuration comprising the VL and VH of the first antigen binding fragment and the second antigen binding fragment.

TABLE 8

CD3 CDR SEQUENCES

| Construct | CDR REGION | Amino Acid Sequence | SEQ ID NO: |
|---|---|---|---|
| 3.23, 3.30, 3.31, 3.32 | CDR-L1 | RSSNGAVTSSNYAN | 735 |
| 3.24 | CDR-L1 | RSSNGEVTTSNYAN | 736 |
| 3.33, 3.9 | CDR-L1 | RSSTGAVTTSNYAN | 737 |
| 3.23, 3.30, 3.31, 3.32, 3.9, 3.33 | CDR-L2 | GTNKRAP | 738 |
| 3.24 | CDR-L2 | GTIKRAP | 739 |
| 3.23, 3.24, 3.30, 3.31, 3.32 | CDR-L3 | ALWYPNLWVF | 740 |
| 3.33, 3.9 | CDR-L3 | ALWYSNLWVF | 741 |
| 3.23, 3.24, 3.30, 3.31, 3.32, 3.9, 3.33 | CDR-H1 | GFTFNTYAMN | 742 |
| 3.23, 3.24, 3.30, 3.31, 3.32, 3.9, 3.33 | CDR-H2 | RIRSKYNNYATYYADSVKD | 743 |
| 3.23, 3.24, 3.30, 3.31, 3.32 | CDR-H3 | HENFGNSYVSWFAH | 744 |
| 3.9, 3.33 | CDR-H3 | HGNFGNSYVSWFAY | 745 |

TABLE 9

CD3 FR SEQUENCES

| Construct | FR REGION | Amino Acid Sequence | SEQ ID NO: |
|---|---|---|---|
| 3.23, 3.24, 3.30, 3.31, 3.32, 3.9, 3.33 | FR-L1 | ELVVTQEPSLTVSPGGTVTLTC | 746 |
| 3.23, 3.24, 3.30, 3.31, 3.32, 3.9, 3.33 | FR-L2 | WVQQKPGQAPRGLIG | 747 |
| 3.23, 3.24 | FR-L3 | GTPARFSGSLLGGKAALTLSGVQPEDEAVYYC | 748 |
| 3.30 | FR-L3 | GTPARFSGSSLGGKAALTLSGVQPEDEAVYYC | 749 |
| 3.31 | FR-L3 | GTPARFSGSLLGGSAALTLSGVQPEDEAVYYC | 750 |
| 3.32 | FR-L3 | GTPARFSGSSLGGSAALTLSGVQPEDEAVYYC | 751 |
| 3.9 | FR-L3 | GTPARFSGSLLGGKAALTLSGVQPEDEAEYYC | 752 |
| 3.33 | FR-L3 | GTPARFSGSSLGGSAALTLSGVQPEDEAEYYC | 753 |
| 3.23, 3.24, 3.30, 3.31, 3.32, 3.9, 3.33 | FR-L4 | GGGTKLTVL | 754 |
| 3.23, 3.24 | FR-H1 | EVQLLESGGGIVQPGGSLKLSCAAS | 755 |
| 3.30, 3.31, 3.32 | FR-H1 | EVQLQESGGGIVQPGGSLKLSCAAS | 756 |
| 3.33 | FR-H1 | EVQLQESGGGLVQPGGSLKLSCAAS | 757 |
| 3.9 | FR-H1 | EVQLLESGGGLVQPGGSLKLSCAAS | 758 |
| 3.23, 3.24, 3.30, 3.31, 3.32, 3.9, 3.33 | FR-H2 | WVRQAPGKGLEWVA | 759 |
| 3.23, 3.24, 3.30, 3.31, 3.32 | FR-H3 | RFTISRDDSKNTVYLQMNNLKTEDTAVYYCVR | 760 |
| 3.9, 3.33 | FR-H3 | RFTISRDDSKNTAYLQMNNLKTEDTAVYYCVR | 762 |
| 3.23, 3.24, 3.30, 3.31, 3.32, 3.9, 3.33 | FR-H4 | WGQGTLVTVSS | 764 |

TABLE 10

VL & VH SEQUENCES

| Construct | REGION | Amino Acid Sequence | SEQ ID |
|---|---|---|---|
| 3.23 | VL | ELVVTQEPSLTVSPGGTVTLTCRSSNGAVTSSNYANWVQQK PGQAPRGLIGGTNKRAPGTPARFSGSLLGGKAALTLSGVQP EDEAVYYCALWYPNLWVFGGGTKLTVL | 765 |
| 3.23, 3.24 | VH | EVQLLESGGGIVQPGGSLKLSCAASGFTFNTYAMNWVRQAP GKGLEWVARIRSKYNNYATYYADSVKDRFTISRDDSKNTVY LQMNNLKTEDTAVYYCVRHENFGNSYVSWFAHWGQGTLVTV SS | 766 |
| 3.24 | VL | ELVVTQEPSLTVSPGGTVTLTCRSSNGEVTTSNYANWVQQK PGQAPRGLIGGTIKRAPGTPARFSGSLLGGKAALTLSGVQP EDEAVYYCALWYPNLWVFGGGTKLTVL | 767 |
| 3.30 | VL | ELVVTQEPSLTVSPGGTVTLTCRSSNGAVTSSNYANWVQQK PGQAPRGLIGGTNKRAPGTPARFSGSSLGGKAALTLSGVQP EDEAVYYCALWYPNLWVFGGGTKLTVL | 768 |
| 3.30, 3.31, 3.32 | VH | EVQLQESGGGIVQPGGSLKLSCAASGFTFNTYAMNWVRQAP GKGLEWVARIRSKYNNYATYYADSVKDRFTISRDDSKNTVY LQMNNLKTEDTAVYYCVRHENFGNSYVSWFAHWGQGTLVTV SS | 769 |
| 3.31 | VL | ELVVTQEPSLTVSPGGTVTLTCRSSNGAVTSSNYANWVQQK PGQAPRGLIGGTNKRAPGTPARFSGSLLGGSAALTLSGVQP EDEAVYYCALWYPNLWVFGGGTKLTVL | 770 |
| 3.32 | VL | ELVVTQEPSLTVSPGGTVTLTCRSSNGAVTSSNYANWVQQK PGQAPRGLIGGTNKRAPGTPARFSGSSLGGSAALTLSGVQP EDEAVYYCALWYPNLWVFGGGTKLTVL | 771 |
| 3.9 | VL | ELVVTQEPSLTVSPGGTVTLTCRSSTGAVTTSNYANWVQQK PGQAPRGLIGGTNKRAPGTPARFSGSLLGGKAALTLSGVQP EDEAEYYCALWYSNLWVFGGGTKLTVL | 772 |
| 3.9 | VH | EVQLLESGGGLVQPGGSLKLSCAASGFTFNTYAMNWVRQAP GKGLEWVARIRSKYNNYATYYADSVKDRFTISRDDSKNTAY LQMNNLKTEDTAVYYCVRHGNFGNSYVSWFAYWGQGTLVTV SS | 773 |
| 3.33 | VL | ELVVTQEPSLTVSPGGTVTLTCRSSTGAVTTSNYANWVQQK PGQAPRGLIGGTNKRAPGTPARFSGSSLGGSAALTLSGVQP EDEAEYYCALWYSNLWVFGGGTKLTVL | 774 |
| 3.33 | VH | EVQLQESGGGLVQPGGSLKLSCAASGFTFNTYAMNWVRQAP GKGLEWVARIRSKYNNYATYYADSVKDRFTISRDDSKNTAY LQMNNLKTEDTAVYYCVRHGNFGNSYVSWFAYWGQGTLVTV SS | 775 |

TABLE 11:

scFv sequences

| Construct | Amino Acid Sequence | SEQ ID NO: |
|---|---|---|
| 3.23 | ELVVTQEPSLTVSPGGTVTLTCRSSNGAVTSSNYANWVQQKPGQAPRGLIG GTNKRAPGTPARFSGSLLGGKAALTLSGVQPEDEAVYYCALWYPNLWVFGG GTKLTVLGATPPETGAETESPGETTGGSAESEPPGEGEVQLLESGGGIVQP GGSLKLSCAASGFTFNTYAMNWVRQAPGKGLEWVARIRSKYNNYATYYADS VKDRFTISRDDSKNTVYLQMNNLKTEDTAVYYCVRHENFGNSYVSWFAHWG QGTLVTVSS | 776 |
| 3.24 | ELVVTQEPSLTVSPGGTVTLTCRSSNGEVTTSNYANWVQQKPGQAPRGLIG GTIKRAPGTPARFSGSLLGGKAALTLSGVQPEDEAVYYCALWYPNLWVFGG GTKLTVLGATPPETGAETESPGETTGGSAESEPPGEGEVQLLESGGGIVQP GGSLKLSCAASGFTFNTYAMNWVRQAPGKGLEWVARIRSKYNNYATYYADS VKDRFTISRDDSKNTVYLQMNNLKTEDTAVYYCVRHENFGNSYVSWFAHWG QGTLVTVSS | 777 |
| 3.30 | ELVVTQEPSLTVSPGGTVTLTCRSSNGAVTSSNYANWVQQKPGQAPRGLIG GTNKRAPGTPARFSGSSLGGKAALTLSGVQPEDEAVYYCALWYPNLWVFGG GTKLTVLGATPPETGAETESPGETTGGSAESEPPGEGEVQLQESGGGIVQP GGSLKLSCAASGFTFNTYAMNWVRQAPGKGLEWVARIRSKYNNYATYYADS VKDRFTISRDDSKNTVYLQMNNLKTEDTAVYYCVRHENFGNSYVSWFAHWG QGTLVTVSS | 778 |
| 3.31 | ELVVTQEPSLTVSPGGTVTLTCRSSNGAVTSSNYANWVQQKPGQAPRGLIG GTNKRAPGTPARFSGSLLGGSAALTLSGVQPEDEAVYYCALWYPNLWVFGG GTKLTVLGATPPETGAETESPGETTGGSAESEPPGEGEVQLQESGGGIVQP GGSLKLSCAASGFTFNTYAMNWVRQAPGKGLEWVARIRSKYNNYATYYADS VKDRFTISRDDSKNTVYLQMNNLKTEDTAVYYCVRHENFGNSYVSWFAHWG QGTLVTVSS | 779 |
| 3.32 | ELVVTQEPSLTVSPGGTVTLTCRSSNGAVTSSNYANWVQQKPGQAPRGLIG GTNKRAPGTPARFSGSSLGGSAALTLSGVQPEDEAVYYCALWYPNLWVFGG GTKLTVLGATPPETGAETESPGETTGGSAESEPPGEGEVQLQESGGGIVQP GGSLKLSCAASGFTFNTYAMNWVRQAPGKGLEWVARIRSKYNNYATYYADS VKDRFTISRDDSKNTVYLQMNNLKTEDTAVYYCVRHENFGNSYVSWFAHWG QGTLVTVSS | 780 |
| 3.9 | ELVVTQEPSLTVSPGGTVTLTCRSSTGAVTTSNYANWVQQKPGQAPRGLIG GTNKRAPGTPARFSGSLLGGKAALTLSGVQPEDEAEYYCALWYSNLWVFGG GTKLTVLGATPPETGAETESPGETTGGSAESEPPGEGEVQLLESGGGLVQP GGSLKLSCAASGFTFNTYAMNWVRQAPGKGLEWVARIRSKYNNYATYYADS VKDRFTISRDDSKNTAYLQMNNLKTEDTAVYYCVRHGNFGNSYVSWFAYWG QGTLVTVSS | 781 |
| 3.33 | ELVVTQEPSLTVSPGGTVTLTCRSSTGAVTTSNYANWVQQKPGQAPRGLIG GTNKRAPGTPARFSGSSLGGSAALTLSGVQPEDEAEYYCALWYSNLWVFGG GTKLTVLGATPPETGAETESPGETTGGSAESEPPGEGEVQLQESGGGLVQP GGSLKLSCAASGFTFNTYAMNWVRQAPGKGLEWVARIRSKYNNYATYYADS VKDRFTISRDDSKNTAYLQMNNLKTEDTAVYYCVRHGNFGNSYVSWFAYWG QGTLVTVSS | 782 |
| 4.11 | QSVLTQPPSASGTPGQRVTISCSGSSSNIGSNYVYWYQQLPGTAPKLLIYR NNQRPSGVPDRFSGSKSGTSASLAISGLRSEDEADYYCAAWDDSLSGLWVF GGGTKLTVLGATPPETGAETESPGETTGGSAESEPPGEGQVQLQQWGGGLV KPGGSLRLSCAASGFTFSSYSMNWVRQAPGKGLEWVSRINSDGSSTNYADS VKGRFTISRDNAKNTLYLQMNSLRAEDTAVYYCARELRWGNWGQGTLVTVS S | 783 |
| 4.12 | QAGLTQPPSASGTPGQRVTLSCSGSYSNIGTYYVYWYQQLPGTAPKLLIYS NDQRLSGVPDRFSGSKSGTSASLAISGLQSEDEAAYYCAAWDDSLNGWAFG GGTKLTVLGATPPETGAETESPGETTGGSAESEPPGEGQVQLQQWGGGLVK PGGSLRLSCAASGFTFSSYSMNWVRQAPGKGLEWVSRINSDGSSTNYADSV KGRFTISRDNAKNTLYLQMNSLRAEDTAVYYCARELRWGNWGQGTLVTVSS | 784 |
| 4.13 | QPGLTQPPSASGTPGQRVTLSCSGRSSNIGSYYVYWYQHLPGMAPKLLIYR NSRRPSGVPDRFSGSKSGTSASLVISGLQSDDEADYYCAAWDDSLKSWVFG GGTKLTVLGATPPETGAETESPGETTGGSAESEPPGEGQVQLQQWGGGLVK PGGSLRLSCAASGFTFSSYSMNWVRQAPGKGLEWVSRINSDGSSTNYADSV KGRFTISRDNAKNTLYLQMNSLRAEDTAVYYCARELRWGNWGQGTLVTVSS | 785 |
| 4.14 | QSVLTQPPSASGTPGQRVTISCSGSSSNIGTNYVYWYQQFPGTAPKLLIYS NNQRPSGVPDRFSGSKSGTSGSLAISGLQSEDEADYSCAAWDDSLNGWVFG GGTKLTVLGATPPETGAETESPGETTGGSAESEPPGEGQVQLVQWGGGLVK PGGSLRLSCAASGFTFSSYSMNWVRQAPGKGLEWVSRINSDGSSTNYADSV KGRFTISRDNAKNTLYLQMNSLRAEDTAVYYCARELRWGNWGQGTLVTVSS | 786 |
| 4.15 | QPGLTQPPSASGTPGQRVTISCSGSSSNIGSNYVYWYQQLPGTAPKLLIYR NNQRPSGVPDRLSGSKSGTSASLAISGLRSEDEADYYCAAWDDSLSGWVFG GGTKLTVLGATPPETGAETESPGETTGGSAESEPPGEGQVQLVQWGGGLVK PGGSLRLSCAASGFTFSSYSMNWVRQAPGKGLEWVSRINSDGSSTNYADSV KGRFTISRDNAKNTLYLQMNSLRAEDTAVYYCARELRWGNWGQGTLVTVSS | 787 |
| 4.16 | QAVLTQPPSASGTPGQRVTISCSGSSSNIGSYYVYWYQQVPGAAPKLLMRL NNQRPSGVPDRFSGAKSGTSASLVISGLRSEDEADYYCAAWDDSLSGQWVF GGGTKLTVLGATPPETGAETESPGETTGGSAESEPPGEGQVQLQQWGGGLV KPGGSLRLSCAASGFTFSSYSMNWVRQAPGKGLEWVSRINSDGSSTNYADS VKGRFTISRDNAKNTLYLQMNSLRAEDTAVYYCARELRWGNWGQGTLVTVS S | 788 |
| 4.17 | QAGLTQPPSASGTPGQRVTISCSGSSSNIGSNYVYWYQQLPGTAPKLLIYR NNQRPSGVPDRFSGSKSGTSASLAISGLRSEDEADYYCATWDASLSGWVFG GGTKLTVLGATPPETGAETESPGETTGGSAESEPPGEGEVQLVQWGGGLVK PGGSLRLSCAASGFTFSSYSMNWVRQAPGKGLEWVSRINSDGSSTNYADSV KGRFTISRDNAKNTLYLQMNSLRAEDTAVYYCARELRWGNWGQGTLVTVSS | 789 |

### VI). Bispecific Antigen Binding Compositions - Configurations and Functional Properties

[0189] In another aspect, the present disclosure relates to novel chimeric, bispecific antigen binding compositions that bind to an antigen or epitope of the CD3 protein complex of effector cells (e.g., a T cell) and an EGFR antigen associated with a diseased cell or tissue. Thus, they can be referred to T-cell engagers. As described more fully, below, the bispecific antigen binding compositions are configured in an activatable prodrug form that confer advantages over bispecific T-cell engagers and related compounds known in the art. The compositions of the disclosure have properties that include enhanced stability during their production and purification, enhanced stability and increased half-life in circulation when administered to a subject, the ability to become activated at intended sites of therapy but not in normal, healthy tissue, and, when activated by proteolytic cleavage of the release segments and release of the fused AF1 and AF2, exhibit binding affinity to target and effector cells that is at least comparable to a corresponding conventional bispecific IgG antibody. Upon the binding of the effector cell and target cell by the fused AF1 and AF2, an immunological synapse is formed that effects activation of the effector cell and promotes the subsequent destruction of the target cell via apoptosis or cytolysis.

[0190] Various bispecific antigen binding compositions of the disclosure described herein are specifically designed to be in a prodrug form in that the XTEN component(s) shield the antigen binding fragments, reducing their ability to bind their ligands until released from the composition by protease cleavage of any of the protease cleavage sites located within the release segments. Proteases known to be associated with diseased cells or tissues include but are not limited to serine proteases, cysteine proteases, aspartate proteases, and metalloproteases, including but not limited to the specific proteases described herein. This prodrug property of the bispecific antigen binding compositions improves the specificity of the composition towards diseased tissues or cells compared to bispecific T-cell engager therapeutics that are not in a prodrug format. In contrast, by activating the bispecific antigen binding compositions specifically in the microenvironment of the target cell or diseased tissue, where the EGFR antigen and proteases capable of cleaving the release segments are highly expressed, the bispecific antigen binding fragments and XTEN of the constructs are released upon cleavage of the release segment and the fused AF 1 and AF2 can crosslink cytotoxic effector cells with cells expressing an EGFR antigen in a highly specific fashion, thereby directing the cytotoxic potential of the T cell towards the target cell. After protease cleavage, the fused AF 1 and AF2 are no longer shielded and effectively regain their full potential to bind to target cells bearing an EGFR antigen and an effector cell such as a cytotoxic T cell via binding to the CD3 antigen, which forms part of the T cell receptor complex, causing T cell activation that mediates the subsequent lysis of the target cell expressing the particular EGFR antigen. Thus, the bispecific antigen binding compositions are contemplated to display strong, specific and efficient target cell killing. In such case, cells are eliminated selectively, thereby reducing the potential for toxic side effects.

[0191] The design of the subject compositions having a first and a second antigen binding fragment (AF1 and AF2, respectively) was driven by consideration of at least three properties: 1) compositions having bispecific antigen binding fragments with the capability to bind to and link together an effector cell and a target cell having an EGFR antigen with the resultant formation of an immunological synapse; 2) compositions with a XTEN that i) shields both of the antigen binding fragments and reduces their ability to bind the target and effector cell ligands when the composition is in an intact prodrug form, ii) provides enhanced half-life when administered to a subject, iii) reduces extravasation of the intact composition from the circulation in normal tissues and organs compared to diseased tissues (e.g., tumor), and iv) confers an increased safety profile compared to conventional bispecific cytotoxic antibody therapeutics; and 3) is activated when the RS is cleaved by one or more mammalian proteases in proximity of diseased tissues, thereby releasing the bispecific antigen binding fragments such that they regain their full binding affinity potential for the target ligands. The design of the subject compositions takes advantage of the properties of XTEN and the release segment (RS) components, and their positioning relative to the bispecific antigen binding fragments achieves the foregoing properties, as evidenced by the results in the illustrative Examples, below.

[0192] In one embodiment, the disclosure provides bispecific antigen binding compositions having two antigen binding fragments, an AF 1 and AF2 of any of the antigen binding fragment embodiments described herein, wherein the AF2 is fused to the AF1 by a flexible peptide linker. In one embodiment, the bispecific antigen binding fragment composition comprises a first antigen binding fragment (AF1) wherein the AF1 specifically binds to EGFR or an epitope thereof, and a second antigen binding fragment (AF2) wherein the AF2 specifically binds to cluster of differentiation 3 T cell receptor (CD3), wherein a difference between an isoelectric point (pI) of the second antigen binding fragment and a pI of the first antigen binding fragment is from 0 to about 0.2, 0.3, 0.4, 0.5, 0.6, 0.7, 0.8, 0.9, 1.0, 1.1, 1.2, 1.3, 1.4, or 1.5 pH units, as determined computationally or via in vitro assays. In one embodiment of the bispecific antigen binding composition, the AF1 specifically binds EGFR with a K_{d} between about 0.1 nM and about 100 nM, or about 0.5 nm and about 50 nM, or about 1 nm and about 20 nM, or about 2 nM and about 10 nM, as determined by an in vitro antigen-binding assay comprising EGFR or an epitope thereof. In another embodiment of the bispecific antigen binding composition, the AF2 specifically binds human or cyno CD3 with a dissociation constant (K_{d}) constant between about 0.1 nM and about 100 nM, or between about 0.5 nM and about 50 nM, or between about 1.0 nM and about 20 nM, or between about 2.0 nM and about 10 nM, as determined in an in vitro antigen-binding assay. In another embodiment of the bispecific antigen binding composition, the AF2 specifically binds human or cyno CD3 with a dissociation constant (K_{d}) constant between about 10 nM and about 400 nM, as determined in an in vitro antigen-binding assay. In yet another embodiment of the bispecific antigen binding composition, the AF2 specifically binds human or cyno CD3 with a dissociation constant (K_{d}) constant between about 10 nM and about 400 nM, or between about 50 nM and about 350 nM, or between about 100 nM and 300 nM, as determined in an in vitro antigen-binding assay. In another embodiment of the bispecific antigen binding composition, the AF2 specifically binds human or cyno CD3 with a dissociation constant (K_{d}) weaker than about 3 nM, or about 10 nM, or about 50 nM, or about 100 nM, or about 150 nM, or about 200 nM, or about 250 nM, or about 300 nM, or about 400 nM, as determined in an in vitro antigen-binding assay. In another embodiment of the bispecific antigen binding composition, the AF2 specifically binds human or cyno CD3 with at least 2-fold, 3-fold, 4-fold, 5-fold, 6-fold, 7-fold, 8-fold, 9-fold, or at least 10-fold weaker binding affinity than an antibody-binding fragment consisting of an amino acid sequence of SEQ ID NO: 781, as determined by the respective dissociation constants (K_{d}) in an in vitro antigen-binding assays. In another embodiment of the bispecific antigen binding composition, the AF2 exhibits a binding affinity to CD3 that is at least 2-fold, 3-fold, 4-fold, 5-fold, 6-fold, 7-fold, 8-fold, 9-fold, 10-fold, 20-fold, 50-fold, 100-fold, or at least 1000-fold at weaker relative to that of the AF1, as determined by the respective dissociation constants (K_{d}) in an in vitro antigen-binding assay. For clarity, an antigen binding fragment with a K_{d} of 400 binds its ligand more weakly than one with a K_{d} of 10 nM.

[0193] In another embodiment of the bispecific antigen binding composition of any of the subject embodiments described herein having two antigen binding fragments (AF1 and AF2), a single RS, and a single XTEN, the polypeptide can have, in an uncleaved state, a structural arrangement from N-terminus to C-terminus of AF2-AF1-RS1-XTEN1, AF1-AF2-RS1-XTEN1, XTEN1-RS1-AF2-AF1, XTEN1-RS1-AF1-AF2, or diabody-RS1-XTEN1, or XTEN1-RS1-diabody, wherein the diabody comprises VL and VH of the AF1 and AF2.

[0194] In another aspect, it is a feature of various designed compositions of any of the embodiments described herein that when the RS of the bispecific antigen binding composition is cleaved by a mammalian protease in the environment of the target cell and is converted from the prodrug form to the activated or apoprotein form, upon cleavage and release of the bispecific antigen binding fragments and the XTEN from the composition, the fused AF1 and AF2 bind to and link together an effector cell (e.g., a T cell bearing CD3) targeted by the AF2 and a diseased cell bearing the EGFR antigen of a target cell targeted by the AF1, whereupon the effector cell is activated. In one embodiment, wherein RS of the bispecific antigen binding composition is cleaved and the antigen binding fragments are released, the subsequent concurrent binding of the effector cell and the target cell results in at least a 3-fold, or a 10-fold, or a 30-fold, or a 100-fold, or a 300-fold, or a 1000-fold activation of the effector cell, wherein the activation is assessed by the production of cytokines, cytolytic proteins, or lysis of the target cell, assessed in an in vitro cell-based assay. In another embodiment, the concurrent binding of a T cell bearing the CD3 antigen and a target cell bearing the EGFR antigen by the released antigen binding fragments forms an immunologic synapse, wherein the binding results in the release of T cell-derived effector molecules capable of lysing the diseased cell. Non-limiting examples of the in vitro assay for measuring effector cell activation and/or cytolysis include cell membrane integrity assay, mixed cell culture assay, FACS based propidium Iodide assay, trypan Blue influx assay, photometric enzyme release assay, ELISA, radiometric 51Cr release assay, fluorometric Europium release assay, CalceinAM release assay, photometric MTT assay, XTT assay, WST-1 assay, alamar Blue assay, radiometric 3H-Thd incorporation assay, clonogenic assay measuring cell division activity, fluorometric Rhodamine123 assay measuring mitochondrial transmembrane gradient, apoptosis assay monitored by FACS-based phosphatidylserine exposure, ELISA-based TUNEL test assay, caspase activity assay, and cell morphology assay, or other assays known in the art for the assay of cytokines, cytolytic proteins, or lysis of cells, or the methods described in the Examples, below.

[0195] In other embodiments, the disclosure provides bispecific antigen binding compositions having two antigen binding fragments of any of the embodiments described herein, two RS of any of the embodiments described herein, and two XTEN of any of the embodiments described herein. The design of these compositions was driven by considerations of further reducing the binding affinity of the uncleaved compositions to the respective ligands of the AF1 and AF2 antibody fragments by the addition of the second XTEN in order to further reduce the unintended binding of the compositions to healthy tissues or cells when administered to a subject, thereby further improving the therapeutic index of the subject compositions compared to compositions having only one RS and one XTEN. The addition of the second RS and second XTEN resulted in a surprising reduction of binding affinity of the intact, uncleaved polypeptide to the respective ligands of the AF1 and AF2 antibody fragments relative to those compositions having a single RS and XTEN, when assayed in vitro, and also resulted in reduced toxicity in animal models of disease when administered as therapeutically-effective doses, as described in the Examples, below. In embodiments of compositions having a two antigen binding fragments, two RS, and two XTEN, the compositions can have, in an uncleaved state, a structural arrangement from N-terminus to C-terminus of XTEN1-RS1-AF2-AF1-RS2-XTEN2, XTEN1-RS1-AF1-AF2-RS2-XTEN2, XTEN2-RS2-AF2-AF1-RS1-XTEN1, XTEN2-RS2-AF1-AF2-RS1-XTEN1, XTEN2-RS2-diabody-RS1-XTEN1, wherein the diabody comprises VL and VH of the AF1 and AF2, or XTEN1-RS1-diabody-RS2-XTEN2, wherein the diabody comprises VL and VH of the AF1 and AF2.

[0196] Without being bound to a particular theory, it is believed that using the bispecific antigen binding composition formats as described above, upon cleavage of the RS, the released fused AF1 and AF2 are capable of killing target cells by recruitment of cytotoxic effector cells without any need for pre- and/or co-stimulation. Further, the independence from pre- and/or co-stimulation of the effector cell may substantially contribute to the exceptionally high cytotoxicity mediated by the released, fused AF1 and AF2 antigen binding fragments. In some embodiments, the released AF1 and AF2, wherein the AF1 remains fused to the AF2 by a linker peptide, is designed with binding specificities such that it has the capability to bind and link together in close proximity cytotoxic effector cells (e.g., T cells, NK cells, cytokine induced killer cell (CIK cell)) to preselected EGFR antigens by the AF1 that has binding specificity to EGFR antigens associated with tumor cells, cancer cells, or cells associated with diseased tissues, thereby effecting an immunological synapse and a selective, directed, and localized effect of released cytokines and effector molecules against the target disease or cancer cell, with the result that disease or cancer cells are damaged or destroyed, resulting in therapeutic benefit to a subject. The released AF2 that binds to an effector cell antigen is capable of modulating one or more functions of an effector cell, resulting in or contributing to the cytolytic effect on the target tumor cell. The effector cell antigen can by expressed by the effector cell or other cells. In one embodiment, the effector cell antigen is expressed on cell surface of the effector cell. Non-limiting examples of effector cell antigens are CD3, CD4, CD8, CD16, CD25, CD38, CD45RO, CD56, CD57, CD69, CD95, CD107, and CD154. Thus, it will be understood by one of skill in the art that the configurations of the subject compositions are intended to selectively or disproportionately deliver the active form of the composition to the target tumor tissue or cancer cell, compared to healthy tissue or healthy cells in a subject in which the composition is administered, with resultant therapeutic benefit. As is evident from the foregoing, the disclosure provides a large family of polypeptides in designed configurations to effect the desired properties.

[0197] It is an object of the disclosure that the design of the subject bispecific antigen binding compositions, with the shielding effect imparted by the XTEN of the intact, circulating composition and the concomitant reduced potential to bind to effector cells and target tissues, results in reduced production of Th1 T-cell associated cytokines or other proinflammatory mediators during systemic exposure when administered to a subject such that the overall side-effect and safety profile (e.g., the therapeutic index) is improved compared to bispecific antigen binding compositions not linked to a shielding moiety such as an XTEN. As an important component of cellular immunity, the production of IL-2, TNF-alpha, and IFN-gamma are hallmarks of a Th1 response (Romagnani S. T-cell subsets (Th1 versus Th2). Ann Allergy Asthma Immunol. 2000. 85(1):9-18), particularly in T cells stimulated by anti-CD3 (Yoon, S.H. Selective addition of CXCR3+CCR4-CD4+ Th1 cells enhances generation of cytotoxic T cells by dendritic cells in vitro. Exp Mol Med. 2009. 41(3):161-170), and Il-4, IL-6, and IL-10 are also proinflammatory cytokines important in a cytotoxic response for bispecific antibody compositions (Zimmerman, Z., et al. Unleashing the clinical power of T cells: CD19/CD3 bispecific T cell engager (BiTE®) antibody composition blinatumomab as a potential therapy. Int. Immunol. (2015) 27(1): 31-37). In one embodiment, an intact, uncleaved bispecific antigen binding composition of the embodiments described herein can exhibit at least 3-fold, or at least 4-fold, or at least 5-fold, or at least 6-fold, or at least 7-fold, or at least 8-fold, or at least 9-fold, or at least 10-fold, or at least 20-fold, or at least 30-fold, or at least 50-fold, or at least 100-fold, or at least 1000-fold reduced potential to result in the production of Th1 and/or proinflammatory cytokines when the intact, uncleaved polypeptide is in contact with the effector cell and a target cell in an in vitro cell-based cytokine stimulation assay compared to the Th1 and/or cytokine levels stimulated by the corresponding released AF1 and AF2 (which remain fused together after release by proteolysis of the RS) of a corresponding protease-treated composition in the in vitro cell-based stimulation cytokine assay performed under comparable conditions, e.g., equivalent molar concentrations. Non-limiting examples of Th1 and/or proinflammatory cytokines are IL-2, IL-4, IL-6, IL-10, TNF-alpha and IFN-gamma. In one embodiment of the foregoing, the production of the Th1 cytokine is assayed in an in vitro assay comprising effector cells such as PBMC or CD3+ T cells and target cells having an EGFR antigen disclosed herein. In another embodiment, the cytokines can be assessed from a blood, fluid, or tissue sample removed from a subject in which the polypeptide composition has been administered. In the foregoing embodiment, the subject can be mouse, rat, monkey, and human. In an advantage of the subject bispecific antigen binding compositions of the embodiments described herein, however, it has been discovered that the cytolytic properties of the compositions do not require prestimulation by cytokines; that formation of the immunological synapse of the effector cell bound to the target cell by the antigen binding fragments is sufficient to effect cytolysis or apoptosis in the target cell. Nevertheless, the production of proinflammatory cytokines are useful markers to assess the potency or the effects of the subject polypeptide compositions; whether by in vitro assay or in the monitoring of treatment of a subject with a tumor.

[0198] In the context of use of the bispecific antigen binding fragment compositions in a subject, it is an object of the disclosure that the subject bispecific antigen binding compositions were designed to take advantage of the differential in pore size of the vasculature in tumor or inflamed tissues compared to healthy vasculature by the addition of the XTEN, such that extravasation of the intact bispecific antigen binding composition in normal tissue is reduced, but in the leaky environment of the tumor vasculature or other areas of inflammation, the intact assembly can extravasate and be activated by the proteases in the diseased cell environment, releasing the antigen binding fragments to the effector and target cells (see, e.g., FIG. 5). In the case of the RS of the bispecific antigen binding compositions, the design takes advantage of the circumstance that when a bispecific antigen binding composition is in proximity to diseased tissues; e.g., a tumor, that elaborates one or more proteases, the RS sequences that are susceptible to the one or more proteases expressed by the tumor are capable of being cleaved by the proteases (described more fully, above). The action of the protease cleaves the release segment (RS) of the composition, separating the antigen binding fragments from the XTEN, resulting in components with reduced molecular weight and hydrodynamic radii, particularly for the released fused AF 1 and AF2. As will be appreciated, the decrease in molecular weight and hydrodynamic radius of the composition also confers the property that the released, fused AF 1 and AF2 are able to more freely move in solution, move through smaller pore spaces in tissue and tumors, and extravasate more readily from the larger pores of the tumor vasculature and more readily penetrate into the tumor, resulting in an increased ability to attach to and link together the effector cell and the tumor cell. Such property can be measured by different assays. Thus, it will be appreciated by one of skill in the art that in the context of treatment of a subject using the subject compositions, the bispecific antigen binding compositions are present in a prodrug form and are converted to a more active form when entering a certain cellular environment by the action of proteases co-localized with the disease tissue or cell. Upon release from the composition by the action of the protease(s) in the target tissue, the AF2 with binding specificity to an effector cell antigen and the linked AF1 with binding specificity to an antigen of a target cell regain their full capability to bind to and link together the effector cell to the target cell, forming an immunological synapse. The formation of the immunological synapse causes the effector cell to become activated, with various signal pathways turning on new gene transcription and the release, by exocytosis, the effector molecule contents of its vesicles. Depending on the type of effector cell, different cytokines and lymphokines are released; e.g., Type 1 helper T cells (Th1) release cytokines like IFN-gamma, IL-2 and TNF-alpha while Type 2 helper T cells (Th2) release cytokines like IL-4, IL-5, IL-10, and IL-13 that stimulate B cells, and cytotoxic T Lymphocytes (CTLs) release cytotoxic molecules like perforin and granzymes that kill the target (collectively, “effector molecules”). It is specifically contemplated that upon the concurrent binding to and linking together the effector cell to the target tumor cell by the released bispecific antigen binding fragments of the bispecific antigen binding composition, at very low effector to target (E:T) ratios the tumor cell is acted upon by the effector molecules released by the effector cell into the immunological synapse between the cells, resulting in damage, perforin-mediated lysis, granzyme B-induced cell death and/or apoptosis of the tumor cell. Thus, in another aspect, and without being bound by theory, it is a feature of the designed compositions that when the activatable bispecific antigen binding fragment composition is administered to a subject with a tumor, the prodrug form remains in the circulatory system in normal tissue but is able to extravasate in the more permeable vasculature of the tumor such that the prodrug form of the assembly is activated by the proteases co-localized with the tumor and that the released antigen binding fragments bind together and link an effector cell (e.g., a T cell) and a tumor cell expressing the EGFR antigen targeted by the AF1 of the composition, whereupon the effector cell is activated and lysis of the tumor cell is effected. Stated differently, in some cases, the more permeable vasculature in the tumor tissue may permit the bispecific antigen-binding polypeptide to extravasate into the tissue where the tumor-associated proteases can act on a release segment (RS), cleaving it and releasing the binding moieties, which in turn can bind to and link together the effector cell and the tumor associate cell. In the case of the normal tissue, the extravasation may be blocked by the tighter vasculature barriers or, in the case where the bispecific antigen binding polypeptide does extravasate to some extent, the bispecific antigen binding polypeptide may primarily remain in the “pro” form, as insufficient proteases may be present in the healthy tissue to release the binding moieties, with the net effect that an immunological synapse is not formed. In some cases, the released, fused AF1 and AF2 in the tumor of the subject bound to both a tumor cell and an effector cell exhibits an increased ability to activate effector cells of at least 10-fold, or at least 30-fold, or at least 100-fold, or at least 200-fold, or at least 300-fold, or at least 400-fold, or at least 500-fold, or at least 1000-fold compared to the corresponding intact, uncleaved bispecific antigen binding composition. In other cases, the released, fused AF1 and AF2 in the tumor of the subject bound to both a tumor cell and an effector cell exhibits an increased ability to lyse the tumor cell of at least 10-fold, or at least 30-fold, or at least 100-fold, or at least 200-fold, or at least 300-fold, or at least 400-fold, or at least 500-fold, or at least 1000-fold compared to the corresponding intact bispecific antigen binding composition that has not been cleaved in the tumor. In the foregoing embodiments, the effector cell activation and/or the cytotoxicity can be assayed by conventional methods known in the art, such as cytometric measurement of activated effector cells, assay of cytokines, measurement of tumor size, or by histopathology. In the foregoing embodiments, the subject can be mouse, rat, dog, monkey, and human. In particular, it is specifically contemplated that the subject compositions are designed such that upon administration to a subject with a disease having an EGFR antigen to which the AF2 can bind, the bispecific antigen binding composition exhibits an enhanced therapeutic index and reduced incidence of side effects, compared to conventional bispecific antibodies known in the art, achieved by a combination of the shielding effect and steric hindrance of XTEN on binding affinity over the antigen binding fragments in the prodrug form, yet are able to release the bispecific AF1 and AF2 (achieved by inclusion of the cleavage sequences in the RS) in proximity to or within a target tissue (e.g., a tumor) that produces a protease for which the RS is a substrate.

### VII). Methods and Uses of Bispecific Antigen Binding Compositions

[0199] In another aspect, the present disclosure provides activatable bispecific antigen binding compositions and pharmaceutical compositions comprising a bispecific antigen binding composition that are particularly useful in medical settings; for example, in the prevention, treatment and/or the amelioration of certain cancers, tumors or inflammatory diseases. For use of treatment of diseases, bispecific antigen binding compositions of the invention would be formulated, dosed, and administered in a fashion consistent with good medical practice. Factors for consideration in this context include the particular disorder being treated, the particular mammal being treated, the clinical condition of the individual patient, the cause of the disorder, the site of delivery of the agent, the method of administration, the scheduling of administration, and other factors known to medical practitioners.

[0200] A number of therapeutic strategies have been used to design the polypeptide compositions for use in methods of treatment of a subject with a cancerous disease, including the modulation of T cell responses by targeting TcR signaling, particularly using VL and VH portions of anti-human CD3 monoclonal antibodies that are widely used clinically in immunosuppressive regimes. The CD3-specific monoclonal OKT3 was the first such monoclonal approved for use in humans (Sgro, Toxicology 105 (1995), 23-29) and is widely used clinically as an immunosuppressive agent in transplantation (Chatenoud L: Immunologic monitoring during OKT3 therapy. Clin Transplant 7:422-430, 1993). Moreover, anti-CD3 monoclonals can induce partial T cell signaling and clonal anergy (Smith, J. Exp. Med. 185 (1997), 1413-1422). The OKT3 reacts with and blocks the function of the CD3 complex in the membrane of T cells; the CD3 complex being associated with the antigen recognition structure of T cells (TCR), which is essential for signal transduction. These and other such CD3 specific antibodies are able to induce various T cell responses, including cytokine production (Von Wussow, Human gamma interferon production by leukocytes induced with monoclonal antibodies recognizing T cells. J. Immunol. 127:1197-1200 (1981)), proliferation and suppressor T-cell induction. In cancer, attempts have been made to utilize cytotoxic T cells to lyse cancer cells. Without being bound by theory, to effect target cell lysis, cytotoxic T cells are believed to require direct cell-to-cell contact; the TCR on the cytotoxic T cell must recognize and engage the appropriate antigen on the target cell. This creates the immunologic synapse that, in turn initiates a signaling cascade within the cytotoxic T cell, causing T-cell activation and the production of a variety of cytotoxic cytokines and effector molecules. Perforin and granzymes are highly toxic molecules that are stored in preformed granules that reside in activated cytotoxic T cells. After recognition of the target cell, the cytoplasmic granules of the engaged cytotoxic T cells migrate toward the cytotoxic T-cell membrane, ultimately fusing with it and releasing their contents in directed fashion into the immunological synapse to form a pore within the membrane of the target cell, disrupting the tumor cell plasma membrane. The created pore acts as a point of entry for granzymes; a family of serine proteases that that induce apoptosis of the tumor cells.

[0201] The subject bispecific antigen binding compositions described herein, with an AF2 with specific binding affinity to the CD3 of a T cell closely fused to an AF1 with specific binding affinity to an EGFR antigen are T-cell engagers with the ability, once released from the intact prodrug form of the composition by cleavage of the release segments, regain their full potential to bind a T cell and target cell, forming an immunological synapse that promotes activation of the T-cell and promotes the subsequent destruction of the tumor cell via apoptosis or cytolysis.

[0202] The disclosure contemplates methods of use of bispecific antigen binding compositions that are engineered to target a range of malignant cells, such as tumors, in addition to the effector cells, in order to initiate target cell lysis and to effect a beneficial therapeutic outcome in that the bispecific antigen binding compositions are designed such that one antigen binding fragment binds and engages CD3 to activate the cytotoxic T cell while the second antigen binding fragment can be designed to target EGFR markers that are characteristic of specific malignancies; bridging them together for the creation of the immunological synapse. In a particular advantage of the design, the physical binding of the cytotoxic effector cell and the EGFR-bearing cell eliminates the need for antigen processing, MHCI/β2-microglobulin, as well as co-stimulatory molecules. Because of the range of cells bearing EGFR, it will be appreciated that the resulting compositions will have utility against a variety of cancers, including solid and hematological tumors. In one embodiment, the disclosure provides a method of treatment of a subject with a tumor. The tumor being treated can comprise tumor cells arising from a cell selected from the group consisting of stromal cell, fibroblasts, myofibroblasts, glial cells, epithelial cells, fat cells, lymphocytic cells, vascular cells, smooth muscle cells, mesenchymal cells, breast tissue cells, prostate cells, kidney cells, brain cells, colon cells, ovarian cells, uterine cells, bladder cells, skin cells, stomach cells, genito-urinary tract cells, cervix cells, uterine cells, small intestine cells, liver cells, pancreatic cells, gall bladder cells, bile duct cells, esophageal cells, salivary gland cells, lung cells, and thyroid cells. In a further advantage of the compositions, as the cytotoxic effector cells are not consumed during the damage/destruction of the bridged target cancer cell, after causing lysis of one target cell, an activated effector cell can release and move on through the local tissue towards other target cancer cells, bind the EGFR antigen, and initiate additional cell lysis. In addition, it is contemplated that in a localized environment like a solid tumor, the release of effector cell molecules such as perforin and granzymes will result in damage to tumor cells that are adjacent but not bound by a given molecule of the bispecific binding domains, resulting in stasis of growth or regression of the tumor.

[0203] Accordingly, a utility of the disclosure will be understood; that after administration of a therapeutically effective dose of pharmaceutical composition comprising a bispecific antigen binding composition described herein to a subject with a cancer or tumor having the EGFR antigen, the composition can be acted upon by proteases in association with or co-localized with the cancer or tumor cells, releasing the fused AF1 and AF2 such that an immunological synapse can be created by the linking of the EGFR-bearing cell and a effector cell, with the result that effector cell-derived effector molecules capable of lysing the target cell are released into the synapse, leading to apoptosis, cytolysis, or death of the target cancer or tumor cell. Furthermore, it will be appreciated by one of skill in the art that use of the bispecific antigen binding compositions can result in a sustained and more generalized beneficial therapeutic effect than a “single kill” once the immunological synapse is formed by the binding of the released binding domains to the effector cell and target cancer cell.

[0204] In one aspect, the disclosure relates to methods of treating a disease in a subject, such as a subject with a cancer. In some embodiments, the disclosure provides a method of treating a disease in a subject, comprising administering to the subject in need thereof a therapeutically effective amount of a pharmaceutical composition comprising a bispecific antigen binding composition of any of the embodiments described herein. A therapeutically effective amount of the pharmaceutical composition may vary according to factors such as the disease state, age, sex, and weight of the individual, and the ability of the antibody or antibody portion to elicit a desired response in the individual. A therapeutically effective amount is also one in which any toxic or detrimental effects of the subject compositions are outweighed by the therapeutically beneficial effects. A prophylactically effective amount refers to an amount of pharmaceutical composition required for the period of time necessary to achieve the desired prophylactic result.

[0205] A therapeutically effective dose of the bispecific antigen binding compositions described herein will generally provide therapeutic benefit without causing substantial toxicity. Toxicity and therapeutic efficacy of a bispecific antigen binding composition can be determined by standard pharmaceutical procedures in cell culture or experimental animals. Cell culture assays and animal studies can be used to determine the LD₅₀ (the dose lethal to 50% of a population) and the ED₅₀ (the dose therapeutically effective in 50% of a population). The dose ratio between toxic and therapeutic effects is the therapeutic index, which can be expressed as the ratio LD₅₀/ED₅₀. Bispecific antigen binding compositions that exhibit large therapeutic indices are preferred. In one aspect, the bispecific antigen binding molecule according to the present invention exhibits a high therapeutic index. The data obtained from cell culture assays and animal studies can be used in formulating a range of dosages suitable for use in humans. The dosage lies preferably within a range of circulating concentrations that include the ED₅₀ with little or no toxicity. The dosage may vary within this range depending upon a variety of factors, e.g., the dosage form employed, the route of administration utilized, the condition of the subject, and the like. The exact formulation, route of administration and dosage can be chosen by the individual physician in view of the patient’s condition (see, e.g., Fingl et al., 1975, in: The Pharmacological Basis of Therapeutics, Ch. 1, p. 1). A skilled artisan readily recognizes that in many cases the bispecific antigen binding composition may not provide a cure but may only provide partial benefit. In some aspects, a physiological change having some benefit is also considered therapeutically beneficial. Thus, in some aspects, an amount of bispecific antigen binding composition that provides a physiological change is considered an “effective amount” or a “therapeutically effective amount”. The subject, patient, or individual in need of treatment is typically a mouse, rat, dog, monkey, or human.

[0206] The bispecific antigen binding compositions of the invention may be administered in combination with one or more other agents in therapy. For instance, a bispecific antigen binding molecule of any of the embodiments described herein may be co-administered with at least one additional therapeutic agent. The term “therapeutic agent” encompasses any agent administered to treat a symptom or disease in an individual in need of such treatment. Such additional therapeutic agent may comprise any active ingredients suitable for the particular indication being treated, preferably those with complementary activities that do not adversely affect each other. In certain aspects, an additional therapeutic agent is an immunomodulatory agent, an immuno-oncologic antibody, a cytostatic agent, an inhibitor of cell adhesion, a cytotoxic agent, an activator of cell apoptosis, or an agent that increases the sensitivity of cells to apoptotic inducers. In a particular aspect, the additional therapeutic agent is an anti-cancer agent, for example a microtubule disruptor, an antimetabolite, a topoisomerase inhibitor, a DNA intercalator, an alkylating agent, a hormonal therapy, a kinase inhibitor, a receptor antagonist, an activator of tumor cell apoptosis, or an antiangiogenic agent.

[0207] In one embodiment of the method of treating a disease in a subject, the disease for treatment can be anaplastic and medullary thyroid cancers, appendiceal cancer, arrhenoblastoma, biliary tract carcinoma, bladder cancer, breast cancer, cancers of the bile duct, carcinoid tumor, cervical cancer, cholangiocarcinoma, colon cancer, colorectal cancer, craniopharyngioma, endometrial cancer, epithelial intraperitoneal malignancy with malignant ascites, esophageal cancer, Ewing sarcoma, fallopian tube cancer, follicular cancer, gall bladder cancer, gastric cancer, gastrointestinal stromal tumor (GIST), GE-junction cancer, genito-urinary tract cancer, glioma, glioblastoma, head and neck cancer, hepatoblastoma, hepatocarcinoma, HR+ and HER2+ breast cancer, Hurthle cell cancer, inflammatory breast cancer, Kaposi sarcoma, kidney cancer, laryngeal cancer, liposarcoma, liver cancer, lung cancer, medulloblastoma, melanoma, Merkel cell carcinoma, neuroblastoma, neuroblastoma, neuroendocrine cancer, non-small cell lung cancer, osteosarcoma (bone cancer), ovarian cancer, ovarian cancer with malignant ascites, pancreatic cancer, pancreatic neuroendocrine tumor, papillary cancer, parathyroid cancer, peritoneal carcinomatosis, peritoneal mesothelioma, primitive neuroectodermal tumor, prostate cancer, retinoblastoma, rhabdomyosarcoma, salivary gland carcinoma, sarcoma, skin cancer, small cell lung cancer, small intestine cancer, stomach cancer, testicular cancer, thyroid cancer, triple negative breast cancer, urothelial cancer, uterine cancer, uterine serous carcinoma, vaginal cancer, vulvar cancer, and Wilms tumor.

[0208] The therapeutically effective amount can produce a beneficial effect in helping to treat (e.g., cure or reduce the severity) or prevent (e.g., reduce the likelihood of recurrence) of a cancer or a tumor. In another embodiment of the method of treating the disease in a subject, the pharmaceutical composition is administered to the subject as two or more therapeutically effective doses administered twice weekly, once a week, every two weeks, every three weeks, every four weeks, or monthly. In another embodiment of the method, the pharmaceutical composition is administered to the subject as two or more therapeutically effective doses over a period of at least two weeks, or at least one month, or at least two months, or at least three months, or at least four months, or at least five months, or at least six months. In another embodiment of the method, a first low priming dose is administered to the subject, followed by one or more higher maintenance doses over the dosing schedule of at least two weeks, or at least one month, or at least two months, or at least three months, or at least four months, or at least five months, or at least six months. The initial priming dose administered is selected from the group consisting of at least about 0.005 mg/kg, at least about 0.01 mg/kg, at least about 0.02 mg/kg, at least about 0.04 mg/kg, at least about 0.08 mg/kg, at least about 0.1 mg/kg, and one or more subsequent maintenance dose(s) administered is selected from the group consisting of at least about 0.02 mg/kg, at least about 0.05 mg/kg, at least about 0.1 mg/kg, at least about 0.16 mg/kg, at least about 0.18 mg/kg, at least about 0.20 mg/kg, at least about 0.22 mg/kg, at least about 0.24 mg/kg, at least about 0.26 mg/kg, at least about 0.27 mg/kg, at least about 0.28 mg/kg, at least 0.3 mg/kg, at least 0.4. mg/kg, at least about 0.5 mg/kg, at least about 0.6 mg/kg, at least about 0.7 mg/kg, at least about 0.8 mg/kg, at least about 0.9 mg/kg, at least about 1.0 mg/kg, at least about 1.5 mg/kg, or at least about 2.0 mg/kg, or at least 5.0 mg/kg. In another embodiment of the method, the pharmaceutical composition is administered to the subject intradermally, subcutaneously, intravenously, intra-arterially, intra-abdominally, intraperitoneally, intrathecally, or intramuscularly. In another embodiment of the method, the pharmaceutical composition is administered to the subject as one or more therapeutically effective bolus doses or by infusion of 5 minutes to 96 hours as tolerated for maximal safety and efficacy. In another embodiment of the method, the pharmaceutical composition is administered to the subject as one or more therapeutically effective bolus doses or by infusion of 5 minutes to 96 hours, wherein the dose is selected from the group consisting of at least about 0.005 mg/kg, at least about 0.01 mg/kg, at least about 0.02 mg/kg, at least about 0.04 mg/kg, at least about 0.08 mg/kg, at least about 0.1 mg/kg, at least about 0.12 mg/kg, at least about 0.14 mg/kg, at least about 0.16 mg/kg, at least about 0.18 mg/kg, at least about 0.20 mg/kg, at least about 0.22 mg/kg, at least about 0.24 mg/kg, at least about 0.26 mg/kg, at least about 0.27 mg/kg, at least about 0.28 mg/kg, at least 0.3 mg/kg, at least 0.4. mg/kg, at least about 0.5 mg/kg, at least about 0.6 mg/kg, at least about 0.7 mg/kg, at least about 0.8 mg/kg, at least about 0.9 mg/kg, at least about 1.0 mg/kg, at least about 1.5 mg/kg, or at least about 2.0 mg/kg, or at least about 5.0 mg/kg. In another embodiment of the method, the pharmaceutical composition is administered to the subject as one or more therapeutically effective bolus doses or by infusion over a period of 5 minutes to 96 hours, wherein the administration to the subject results in a Cmax plasma concentration of the intact, uncleaved bispecific antigen binding composition of at least about 0.1 ng/mL to at least about 2 µg/mL or more in the subject that is maintained for at least about 3 days, at least about 7 days, at least about 10 days, at least about 14 days, or at least about 21 days. The therapeutically effective dose is at least about 0.005 mg/kg, at least about 0.01 mg/kg, at least about 0.02 mg/kg, at least about 0.04 mg/kg, at least about 0.08 mg/kg, at least about 0.1 mg/kg, at least about 0.12 mg/kg, at least about 0.14 mg/kg, at least about 0.16 mg/kg, at least about 0.18 mg/kg, at least about 0.20 mg/kg, at least about 0.22 mg/kg, at least about 0.24 mg/kg, at least about 0.26 mg/kg, at least about 0.27 mg/kg, at least about 0.28 mg/kg, at least 0.3 mg/kg, at least 0.4 mg/kg, at least about 0.5 mg/kg, at least about 0.6 mg/kg, at least about 0.7 mg/kg, at least about 0.8 mg/kg, at least about 0.9 mg/kg, at least about 1.0 mg/kg, at least about 1.5 mg/kg, or at least about 2.0 mg/kg. In one embodiment, an initial dose is selected from the group consisting of at least about 0.005 mg/kg, at least about 0.01 mg/kg, at least about 0.02 mg/kg, at least about 0.04 mg/kg, at least about 0.08 mg/kg, at least about 0.1 mg/kg, and a subsequent dose is selected from the group consisting of at least about 0.1 mg/kg, at least about 0.12 mg/kg, at least about 0.14 mg/kg, at least about 0.16 mg/kg, at least about 0.18 mg/kg, at least about 0.20 mg/kg, at least about 0.22 mg/kg, at least about 0.24 mg/kg, at least about 0.26 mg/kg, at least about 0.27 mg/kg, at least about 0.28 mg/kg, at least 0.3 mg/kg, at least 0.4. mg/kg, at least about 0.5 mg/kg, at least about 0.6 mg/kg, at least about 0.7 mg/kg, at least about 0.8 mg/kg, at least about 0.9 mg/kg, at least about 1.0 mg/kg, at least about 1.5 mg/kg, or at least about 2.0 mg/kg. In the foregoing embodiments, the administration to the subject results in a plasma concentration of the polypeptide of at least about 0.1 ng/mL to at least about 2 ng/mL or more in the subject for at least about 3 days, at least about 7 days, at least about 10 days, at least about 14 days, or at least about 21 days. In the foregoing embodiments of the method, the subject can be a mouse, rat, monkey, or a human.

### VIII). Nucleic Acid Sequences

[0209] In some embodiments, the invention provides isolated polynucleotide sequences encoding the AF1 sequences, or the AF2 sequences, or the release segment sequences (RS1 and RS2), or the XTEN sequences, or the combination of any of these component embodiments described herein, or the complement of the polynucleotide sequences. In one embodiment, the invention provides an isolated polynucleotide sequence encoding a polypeptide or bispecific antigen binding composition of any of the embodiments described herein, or the complement of the polynucleotide sequence. In one embodiment, the invention provides an isolated polynucleotide sequence encoding a polypeptide or bispecific antigen binding composition wherein the polynucleotide sequence has at least 90%, 91%, 92%, 93%, 94%, 95%, 96%, 97%, 98%, 99%, or 100% sequence identity to a polynucleotide sequence set forth in Table 12.

[0210] In another aspect, the disclosure relates to methods to produce polynucleotide sequences encoding the polypeptides or bispecific antigen binding compositions of any of the embodiments described herein, or sequences complementary to the polynucleotide sequences, including homologous variants thereof, as well as methods to express the proteins expressed by the polynucleotide sequences. In general, the methods include producing a polynucleotide sequence coding for the proteinaceous polypeptides or bispecific antigen binding compositions of any of the embodiments described herein and incorporating the encoding gene into an expression vector appropriate for a host cell. For production of the encoded polypeptides or bispecific antigen binding compositions of any of the embodiments described herein, the method includes transforming an appropriate host cell with the expression vector, and culturing the host cell under conditions causing or permitting the resulting polypeptide or bispecific antigen binding composition of any of the embodiments described herein to be expressed in the transformed host cell, thereby producing the polypeptide or bispecific antigen binding composition, which is recovered by methods described herein or by standard protein purification methods known in the art. Standard recombinant techniques in molecular biology are used to make the polynucleotides and expression vectors of the present disclosure.

[0211] In accordance with the disclosure, nucleic acid sequences that encode the polypeptides or bispecific antigen binding compositions of any of the embodiments described herein (or their complement) are used to generate recombinant DNA molecules that direct the expression in appropriate host cells. Several cloning strategies are suitable for performing the present disclosure, many of which are used to generate a construct that comprises a gene coding for a composition of the present disclosure, or its complement. In one embodiment, the cloning strategy is used to create a gene that encodes a construct that comprises nucleotides encoding the polypeptide or bispecific antigen binding composition that is used to transform a host cell for expression of the composition. In the foregoing embodiments hereinabove described in this paragraph, the genes can comprise nucleotides encoding the antigen binding fragments, release segments, and the XTEN in the configurations disclosed herein.

[0212] In one approach, a construct is first prepared containing the DNA sequence encoding a polypeptide or bispecific antigen binding composition construct. Exemplary methods for the preparation of such constructs are described in the Examples. The construct is then used to create an expression vector suitable for transforming a host cell, such as a prokaryotic or eukaryotic host (e.g., mammalian) cell for the expression and recovery of the polypeptide construct. Where desired, the host cell is an E. coli. In another embodiment, the host cell is selected from BHK cells, NS0 cells, SP2/0 cells, YO myeloma cells, P3X63 mouse myeloma cells, PER cells, PER.C6 cells, hybridoma cells, NIH3T3 cells, COS, HeLa, CHO, or yeast cells. Exemplary methods for the creation of expression vectors, the transformation of host cells and the expression and recovery of XTEN are described in the Examples.

[0213] The gene encoding for the polypeptide or bispecific antigen binding composition construct can be made in one or more steps, either fully synthetically or by synthesis combined with enzymatic processes, such as restriction enzyme-mediated cloning, PCR and overlap extension, including methods more fully described in the Examples. The methods disclosed herein can be used, for example, to ligate sequences of polynucleotides encoding the various components (e.g., binding domains, linkers, release segments, and XTEN) genes of a desired length and sequence. Genes encoding polypeptide compositions are assembled from oligonucleotides using standard techniques of gene synthesis. The gene design can be performed using algorithms that optimize codon usage and amino acid composition appropriate for the E. coli or mammalian host cell utilized in the production of the polypeptide or bispecific antigen binding composition. In one method of the disclosure, a library of polynucleotides encoding the components of the constructs is created and then assembled, as described above. The resulting genes are then assembled and the resulting genes used to transform a host cell and produce and recover the polypeptide compositions for evaluation of its properties, as described herein.

[0214] The resulting polynucleotides encoding the polypeptide or bispecific antigen binding composition sequences can then be individually cloned into an expression vector. The nucleic acid sequence is inserted into the vector by a variety of procedures. In general, DNA is inserted into an appropriate restriction endonuclease site(s) using techniques known in the art. Vector components generally include, but are not limited to, one or more of a signal sequence, an origin of replication, one or more marker genes, an enhancer element, a promoter, and a transcription termination sequence. Construction of suitable vectors containing one or more of these components employs standard ligation techniques which are known to the skilled artisan. Such techniques are well known in the art and well described in the scientific and patent literature. Various vectors are publicly available. The vector may, for example, be in the form of a plasmid, cosmid, viral particle, or phage that may conveniently be subjected to recombinant DNA procedures, and the choice of vector will often depend on the host cell into which it is to be introduced. Thus, the vector may be an autonomously replicating vector, i.e., a vector, which exists as an extrachromosomal entity, the replication of which is independent of chromosomal replication, e.g., a plasmid. Alternatively, the vector may be one which, when introduced into a host cell, is integrated into the host cell genome and replicated together with the chromosome(s) into which it has been integrated. Once introduced into a suitable host cell, expression of the antigen binding fragments or bispecific antigen binding compositions can be determined using any nucleic acid or protein assay known in the art. For example, the presence of transcribed mRNA of light chain CDRs or heavy chain CDRs, the antigen binding fragment, or the bispecific antigen binding composition can be detected and/or quantified by conventional hybridization assays (e.g. Northern blot analysis), amplification procedures (e.g. RT-PCR), SAGE (U.S. Pat. No. 5,695,937), and array-based technologies (see e.g. U.S. Pat. Nos. 5,405,783, 5,412,087 and 5,445,934), using probes complementary to any region of antigen binding unit polynucleotide.

[0215] The disclosure provides for the use of plasmid expression vectors containing replication and control sequences that are compatible with and recognized by the host cell, and are operably linked to the gene encoding the polypeptide for controlled expression of the polypeptide. The vector ordinarily carries a replication site, as well as sequences that encode proteins that are capable of providing phenotypic selection in transformed cells. Such vector sequences are well known for a variety of bacteria, yeast, and viruses. Useful expression vectors that can be used include, for example, segments of chromosomal, non-chromosomal and synthetic DNA sequences. “Expression vector” refers to a DNA construct containing a DNA sequence that is operably linked to a suitable control sequence capable of effecting the expression of the DNA encoding the polypeptide in a suitable host. The requirements are that the vectors are replicable and viable in the host cell of choice. Low- or high-copy number vectors may be used as desired.

[0216] Suitable vectors include, but are not limited to, derivatives of SV40 and pcDNA and known bacterial plasmids such as col EI, pCR1, pBR322, pMal-C2, pET, pGEX as described by Smith, et al., Gene 57:31-40 (1988), pMB9 and derivatives thereof, plasmids such as RP4, phage DNAs such as the numerous derivatives of phage I such as NM98 9, as well as other phage DNA such as M13 and filamentous single stranded phage DNA; yeast plasmids such as the 2 micron plasmid or derivatives of the 2 m plasmid, as well as centomeric and integrative yeast shuttle vectors; vectors useful in eukaryotic cells such as vectors useful in insect or mammalian cells; vectors derived from combinations of plasmids and phage DNAs, such as plasmids that have been modified to employ phage DNA or the expression control sequences; and the like. Yeast expression systems that can also be used in the present disclosure include, but are not limited to, the non-fusion pYES2 vector (Invitrogen), the fusion pYESHisA, B, C (Invitrogen), pRS vectors and the like. The control sequences of the vector include a promoter to effect transcription, an optional operator sequence to control such transcription, a sequence encoding suitable mRNA ribosome binding sites, and sequences that control termination of transcription and translation. The promoter may be any DNA sequence, which shows transcriptional activity in the host cell of choice and may be derived from genes encoding proteins either homologous or heterologous to the host cell. Promoters suitable for use in expression vectors with prokaryotic hosts include the β-lactamase and lactose promoter systems [Chang et al., Nature, 275:615 (1978); Goeddel et al., Nature, 281:544 (1979)], alkaline phosphatase, a tryptophan (trp) promoter system [Goeddel, Nucleic Acids Res., 8:4057 (1980); EP 36,776], and hybrid promoters such as the tac promoter [deBoer et al., Proc. Natl. Acad. Sci. USA, 80:21-25 (1983)], all is operably linked to the DNA encoding XTEN polypeptides. Promoters for use in bacterial systems can also contain a Shine-Dalgarno (S.D.) sequence, operably linked to the DNA encoding polypeptide polypeptides.

[0217] Expression of the vector can also be determined by examining the antigen binding fragment or a component of the bispecific antigen binding composition expressed. A variety of techniques are available in the art for protein analysis. They include but are not limited to radioimmunoassays, ELISA (enzyme linked immunoradiometric assays), “sandwich” immunoassays, immunoradiometric assays, in situ immunoassays (using e.g., colloidal gold, enzyme or radioisotope labels), western blot analysis, immunoprecipitation assays, immunoflourescent assays, and SDS-PAGE.

### IX). Methods of Making the Polypeptides and Bispecific Antigen Binding Compositions

[0218] In another aspect, the disclosure provides methods of manufacturing the subject compositions. In one embodiment, the method comprises culturing a host cell comprising a nucleic acid construct that encodes a polypeptide or a bispecific antigen binding composition of any of the embodiments described herein under conditions that promote the expression of the polypeptide or bispecific antigen binding composition, followed by recovery of the polypeptide or bispecific antigen binding composition using standard purification methods (e.g., column chromatography, HPLC, and the like) wherein the composition is recovered wherein at least 70%, or at least 80%, or at least 90%, or at least 95%, or at least 97%, or at least 99% of the binding fragments of the expressed polypeptide or bispecific antigen binding composition are correctly folded. In another embodiment of the method of making, the expressed polypeptide or bispecific antigen binding composition is recovered in which at least or at least 90%, or at least 95%, or at least 97%, or at least 99% of the polypeptide or bispecific antigen binding composition is recovered in monomeric, soluble form.

[0219] In another aspect, the disclosure relates to methods of making the polypeptide and bispecific antigen binding compositions at high fermentation expression levels of functional protein using an E. coli or mammalian host cell, as well as providing expression vectors encoding the constructs useful in methods to produce the cytotoxically active polypeptide construct compositions at high expression levels. In one embodiment, the method comprises the steps of 1) preparing the polynucleotide encoding the polypeptides of any of the embodiments disclosed herein, 2) cloning the polynucleotide into an expression vector, which can be a plasmid or other vector under control of appropriate transcription and translation sequences for high level protein expression in a biological system, 3) transforming an appropriate host cell with the expression vector, and 4) culturing the host cell in conventional nutrient media under conditions suitable for the expression of the polypeptide composition. Where desired, the host cell is E. coli. By the method, the expression of the polypeptide results in fermentation titers of at least 0.05 g/L, or at least 0.1 g/L, or at least 0.2 g/L, or at least 0.3 g/L, or at least 0.5 g/L, or at least 0.6 g/L, or at least 0.7 g/L, or at least 0.8 g/L, or at least 0.9 g/L, or at least 1 g/L of the expression product of the host cell and wherein at least 70%, or at least 80%, or at least 90%, or at least 95%, or at least 97%, or at least 99% of the expressed protein are correctly folded. As used herein, the term “correctly folded” means that the antigen binding fragments component of the composition have the ability to specifically bind its target ligand. In another embodiment, the disclosure provides a method for producing a polypeptide or bispecific antigen binding composition, the method comprising culturing in a fermentation reaction a host cell that comprises a vector encoding a polypeptide comprising the polypeptide or bispecific antigen binding composition under conditions effective to express the polypeptide product at a concentration of more than about 10 milligrams/gram of dry weight host cell (mg/g), or at least about 250 mg/g, or about 300 mg/g, or about 350 mg/g, or about 400 mg/g, or about 450 mg/g, or about 500 mg/g of said polypeptide when the fermentation reaction reaches an optical density of at least 130 at a wavelength of 600 nm, and wherein the antigen binding fragments of the expressed protein are correctly folded. In another embodiment, the disclosure provides a method for producing a polypeptide or bispecific antigen binding composition, the method comprising culturing in a fermentation reaction a host cell that comprises a vector encoding the composition under conditions effective to express the polypeptide product at a concentration of more than about 10 milligrams/gram of dry weight host cell (mg/g), or at least about 250 mg/g, or about 300 mg/g, or about 350 mg/g, or about 400 mg/g, or about 450 mg/g, or about 500 mg/g of said polypeptide when the fermentation reaction reaches an optical density of at least 130 at a wavelength of 600 nm, and wherein the expressed polypeptide product is soluble.

[0220] The following are examples of compositions and evaluations of compositions of the disclosure. It is understood that various other embodiments may be practiced, given the general description provided above.

### EXAMPLES

### Example 1: Construction of Bispecific Antigen Binding Polypeptides With Two Release Segments.

[0221] In order to generate a plasmid where the individual scFv’s can be removed by restriction digest, pCW1700, which encodes for an anti-EpCAM-anti-CD3 (UCHT1) bispecific tandem scFv, with an RSR2486 release segment, an AE866 XTEN and a 6X His tag affinity tag (SEQ ID NO: 794), was digested with SacII and BstXI, removing the 3′ end of the anti-EpCAM binding domain, the linker between the anti-EpCAM and anti-CD3 domains and the 5′ end of the anti-CD3 domain. A fragment of DNA encoding the same region was synthesized with silent point mutations at the junction between the anti-EpCAM binding domain and the linker to introduce a Bsu36I site. Synthetic DNA fragments were cloned into digested backbone using the In-Fusion kit (New England Biolabs) to assemble pJB0035. pJB0035 was subsequently digested with NheI and BsaI to remove the BSRS1 release segment sequence. Overlapping single stranded oligonucleotides encoding RSR2486 were synthesized with single stranded tails that anneal to the NheI and BsaI overhangs. The oligonucleotides were annealed together and ligated into the digested pJB0035, resulting in pCW1880, which encodes for an anti-EpCAM-anti-CD3 (UCHT1) bispecific tandem scFv, RSR2486, XTEN866 and a 6X His tag affinity tag (SEQ ID NO: 794).

[0222] In order to generate a plasmid with different CD3 binding domain variants, pCW1880 was digested with Bsu36I and NheI to remove the UCHT1 anti-CD3 scFv. A DNA fragment encoding CD3.23 was synthesized. The gene fragment included 30 nucleotides 5′ and 3′ of the restriction sites to serve as DNA overlaps for Gibson DNA Assembly. The synthetic DNA fragment was cloned into digested backbone using the Gibson Cloning Kit (SGI-DNA, Carlsbad, CA) to assemble pJB0205.

[0223] In order to generate a bispecific antigen binding polypeptide with both an N-terminal and C-terminal XTEN, the AE292 XTEN was PCR amplified from a plasmid using primers including a 17-21 bp 5′ homology region to backbone DNA on the N-terminus and to an uncleavable release segment (RSR3058, amino acid sequence TTGEAGEAAGATSAGATGP (SEQ ID NO: 111)) on the C-terminus. A second PCR product encoding the light and part of the heavy chain of the anti-EpCAM antibody 4D5MOCB was amplified using primers that included a 16-21 bp 5′ homology region to RSR3058 on the N-terminus and the heavy chain of 4D5MOCB on the C-terminus. These PCR fragments were cloned into a backbone vector digested with BsiWI-SacII that encoding the remainder of the 4D5MOCB heavy chain/anti-CD3 tandem scFv, a second copy of the RSR3058 uncleavable release segment and AE837 XTEN with a 6xHIS affinity tag (SEQ ID NO: 794) using the In-Fusion Plasmid Assembly Kit (Takara Bio). The final vector encodes the bispecific antigen binding polypeptide with the components (from N- to C-terminus) of AE292 XTEN, the uncleavable RSR3058 release segment, anti-EpCAM-anti-CD3 bispecific tandem scFv with RSR3058 fused to AE867 XTEN with a 6xHIS affinity tag (SEQ ID NO: 794) under the control of a PhoA promoter and STII secretion leader. The resulting construct is pJB0084 with the DNA sequence and encoded amino acid sequence provided in Table 12.

[0224] pJB0084 was used as a template to create a bispecific antigen binding polypeptide construct encoding AE292 XTEN, the cleavable release segment RSR2295, anti-EpCAM-anti-CD3 bispecific tandem scFv with RSR2295 fused to AE868 XTEN. The plasmid utilized two PCR products using pJB0084 as a template; the first encoding a 6xHIS affinity tag (SEQ ID NO: 794) and AE292 XTEN with an 5′ homology region to the vector backbone and the 3′ homology region encoding the first RSR2295, the second encoding the anti-EpCAM-anti-CD3 bispecific tandem scFv with 5′ and 3′ homology regions encoding the RSR2295 release segments 5′ and 3′ of the tandem scFvs. The third fragment encoded AE868 XTEN having the C-Tag affinity tag (amino acid sequence EPEA (SEQ ID NO: 796)) with a 5′ homology region encoding the second RSR2295 and a 3′ homology region to the backbone vector. The three PCR fragments were cloned into pJB0084 that had been digested with BsiWI-NotI using the In-Fusion Plasmid Assembly Kit. The final vector, pJB0169, encodes the bispecific antigen binding polypeptide molecule with the components (from N- to C-terminus) of 6xHIS affinity tag (SEQ ID NO: 794), AE292 XTEN, RSR2295 release segment, anti-EpCAM-anti-CD3 bispecific tandem scFv, RSR2295, AE868 XTEN with the C-Tag affinity tag under the control of a PhoA promoter and STII secretion leader with the DNA sequence and protein sequence in Table 12.

[0225] In order to introduce a new CD3 scFv with alterations to the isoelectric point and removal of potential aggregation sites in the amino acid sequence, pJB0244 was digested with BsaI and BbvCI to remove both the HER2 and CD3 scFvs. DNA fragments encoding anti-EGFR scFv variants paired with CD3.33 were synthesized that included 40 bp of homology to the digested vector at both the 5′ and 3′ ends to facilitate Gibson DNA Assembly. Plasmids pJB0358-pJB0372 were assembled with the structure of 6xHIS affinity tag (SEQ ID NO: 794), AE292 XTEN, RSR2295, and individually, a total of 15 anti-EGFR scFv variants paired with an anti-CD3 scFv, RSR2295, AE868 XTEN having a C-Tag affinity tag (DNA and protein sequences in Table 12).

[0226] pAH0025 and pAH0026 were created by initially digesting pJB0368 and pJB0373 with BtsI to remove the anti-CD3 scFv. DNA fragments were ordered encoding the anti-CD3.32 scFv flanked with 40 bp homology regions to the digested backbone. These fragments were introduced into pJB0368 and pJB0373 by Gibson Assembly to create plasmids encoding a 6xHIS affinity tag (SEQ ID NO: 794), AE292 XTEN, RSR2295, anti-EGFR-anti-CD3 bispecific tandem scFv, RSR2295, AE868 XTEN having a C-Tag affinity tag constructed with two different anti-EGFR binding domains, EGFR.23 and EGFR.2 to result in the pAH0025 and pAH0026 constructs (DNA and protein sequences in Table 12). Analogous methodologies would be employed to make constructs having EGFR.13, EGFR.14, EGFR.15, EGFR. 16, EGFR.17, EGFR.18, EGFR.19, EGFR.20, EGFR.21, EGFR.22, EGFR.24, EGFR.25, EGFR.26, EGFR.27, CD3.30, CD3.31, and CD3.33 scFv, in any combination or orientation (i.e., AF1-AF2 or AF2-AF1 in an N- to C-terminal orientation), the sequences of which are provided herein.

Lengthy table referenced here
US20230312729A1-20231005-T00001
Please refer to the end of the specification for access instructions.

Lengthy table referenced here
US20230312729A1-20231005-T00002
Please refer to the end of the specification for access instructions.

### Example 2: Evaluation of CD3 scFv Sequence Variants in Comparison to Parental CD3 scFv

[0227] The purpose of the experiments was to evaluate 4 CD3 sequence variants to determine if the variants had enhanced properties in comparison to the CD3.9 parental scFv.

### 1. Determination of Melting Temperature (Tₘ)

[0228] The melting temperature of each scFv variant was measured to determine its thermal stability. Briefly, a uniform quantity of scFv in 200 µL of 1% BSA-PBST was aliquoted into PCR tubes. Tubes were incubated for one hour at several different temperatures (50° C., 51.4° C., 53.7° C., 57.3° C., 61.7° C., 65.5° C., and 68° C.). 50 µL of each sample was added to an ELISA plate coated with CD3Œµ target antigen (Creative Biomart) or BSA (reference to address stickiness). The wells of the ELISA plate were prefilled with 1% BSA-PBST (50 µl/well). Plates were incubated for 1 hour at room temperature. Plates were washed three times with water with 0.05% TWEEN to remove unbound scFv. Bound scFv was detected by adding an anti-YOL antibody (Thermo Scientific # MA180189) (1:500 diluted in 1% BSA-PBST (0.05%)) that detects a porcine alpha-tubulin motif in the linker between the heavy and light chain. Samples were incubated at room temperature for 1 hour. Plates were washed three times with water with 0.05% TWEEN to remove unbound scFv. The anti-YOL antibody was detected by adding an anti-rat-HRP antibody (Thermo Scientific # 31470) (1:7500 diluted in 1% BSA-PBST (0.05%)) [100 Œ°l/well) and incubating at room temperature for 1 hour. Plates were washed three times with water with 0.05% TWEEN to remove unbound antibody. Plates were developed using TMB (3,3’,5,5′-tetramethylbenzidine) substrate (100 µL/well for 6 minutes at room temperature. The reactions were stopped with H2SO4 (0.5 M, 100 µL/well). The relative activity was measured as the absorbance reading at 450 nM. The absorbance at each temperature was graphed. The melting temperature was determined to be the EC50 of each sample, the temperature at which the binding of the scFv was reduced to 50% of maximal signal. The results are presented in Table 15.

[0229] Results: The assay results demonstrate that the CD3 scFv 3.23 and 3.24 had a Tm of 5° C. higher than the parental CD3.9, while the CD3.25 and CD3.26 (sequences shown in Table 14) scFv had Tₘ that were equivalent to the parental CD3.9.

TABLE 14

scFv Sequences

| Construct | Amino Acid Sequence | SEQ ID NO: |
|---|---|---|
| CD3.25 | ELVVTQEPSHTVSPGGTVTLTCRSSTGAVTSSNYANWVQQKPGQAPRGLI GGTIKRAPGTPARFSGSLLGGKAALTLSGVQPEDEAEYYCALWYPNLWVF GGGTKLTVLGATPPETGAETESPGETTGGSAESEPPGEGEVQLLESGGGI VQPGGSLKLSCAASGFTFNTYAMNWVRQAPGKGLEWVARIRSKYNNYATY YADSVKDRFTISRDDSKNTVYLQMNNLKTEDTAVYYCVRHENFGNSYVSW FAHWGQGTLVTVSS | 938 |
| CD3.26 | ELVVTQEPSHTVSPGGTVTLTCRSSTGEVTTSNYANWVQQKPGQAPRGLI GGTIKRAPGTPARFSGSLLGGKAALTLSGVQPEDEAEYYCALWYPNLWVF GGGTKLTVLGATPPETGAETESPGETTGGSAESEPPGEGEVQLLESGGGI VQPGGSLKLSCAASGFTFNTYAMNWVRQAPGKGLEWVARIRSKYNNYATY YADSVKDRFTISRDDSKNTVYLQMNNLKTEDTAVYYCVRHENFGNSYVSW FAHWGQGTLVTVSS | 939 |

### 2. Determination of Binding Affinity to CD3

[0230] The binding affinity of each scFv was measured using the ForteBio BLItz instrument. A dilution series of each scFv was prepared in PBS (300 µL/tube) starting from 1000 nM to 62.5 nM in one to one dilution steps for CD3.24-26, 400 nM to 25 nM in one to one dilution steps for CD3.23. Biotinylated CD3Œµ antigen (Creative Biomart) was diluted in PBS to a final concentration of 30 ug/ml. Streptavidin Biosensors (ForteBio) were activated in PBS for 10 minutes. To perform the measurements, the streptavidin biosensors were applied to the BLItz instrument. A tube containing 300 µL of PBS was transferred to the BLItz instrument for 30 seconds. A tube containing biotinylated CD3Œµ (30 ug/ml, 300 µL/tube) was transferred to the BLItz instrument to measure capture of antigen to sensor for 120 seconds. A tube containing 300 µL of PBS was transferred to the BLItz instrument for 30 seconds to measure the baseline signal. A tube containing test scFv (30 ug/ml, 300 µL/tube) was transferred to the BLItz instrument to measure association of the scFv to antigen-loaded biosensor for 120 seconds. A tube containing 300 µL of PBS was transferred to the BLItz instrument for 120 seconds to measure dissociation of the scFv scFv from the antigen-loaded biosensor. The protocol was repeated for each scFv dilution. The K_{D} of each antibody was determined using the BLI software (ForteBio). The results are presented in Table 15.

[0231] Results: The assay results demonstrate that the CD3 sequence variants all had reduced binding affinity to CD3 in comparison to the parental CD3.9.

TABLE 15

TM and Binding Affinity Results

| scFv Construct | Melting temp (°C) | Binding Affinity (nM) |
|---|---|---|
| CD3.9 | 57 | 75 |
| CD3.23 | 62 | 175 |
| CD3.24 | 62 | 296 |
| CD3.25 | 57 | 215 |
| CD3.26 | 57 | 221 |

[0232] Conclusions: Two new anti-CD3 scFvs have been identified that have improved thermal stability. Each new scFv has 8 to 9 mutations relative to CD3.9, residing primarily in the CDRs. These mutations have reduced affinity of the scFvs for their target (CD3) compared to the parental CD3.9 but bispecific T cell engagers utilizing CD3.23 are still efficacious in cell killing assays and in vivo.

### Example 3: Fermentation and Purification of Stable Chimeric Fusion Polypeptide Comprising Bispecific Antigen Binding Fragments, Release Segments, and XTEN

[0233] The following example describes production of a chimeric bispecific antigen binding fragment composition.

[0234] Construct ID pJB0169 is a molecule having eight distinct domains. From the N-terminus to the C-terminus, the molecule consists of an N-terminal polyhistidine tag (His6) (SEQ ID NO: 794), an unstructured 292 amino acid chain (XTEN_AE293), a protease cleavable release segment (RS), an anti-EGFR scFv (aEGFR.2), an anti-CD3 scFv (aCD3.9), another protease cleavable release segment (RS), an unstructured 864 amino acid chain, and four C-terminal residues - glutamic acid, proline, glutamic acid, alanine (C-tag) (XTEN_AE868).

[0235] EXPRESSION: Molecule pJB0169 was expressed in a proprietary E. coli AmE098 strain and partitioned into the periplasm via an N-terminal secretory leader sequence (MKKNIAFLLASMFVFSIATNAYA- (SEQ ID NO: 940)), which was cleaved during translocation. Fermentation cultures were grown with animal-free complex medium at 37° C. and temperature shifted to 26° C. prior to phosphate depletion with continued fermentation for 12 hours following phosphate depletion. During harvest, fermentation whole broth was centrifuged to pellet the cells. At harvest, the total volume and the wet cell weight (WCW; ratio of pellet to supernatant) were recorded, and the pelleted cells were collected and frozen at -80° C.

[0236] CLARIFICATION: Frozen cell pellet of pJB0169 was resuspended 3-fold in lysis buffer (60 mM acetic acid, 350 mM NaCl) at pH 4.5, and the cells were lysed via homogenization. The homogenate was flocculated overnight at pH 4.5 and 2-8° C. The flocculated homogenate was centrifuged, and the supernatant was retained. The supernatant was diluted approximately 3-fold with water, then adjusted to 7±1 mS/cm with NaCl. The supernatant was then adjusted to 0.1% (m/m) diatomaceous earth and mixed via impeller. The supernatant was filtered through a filter train ending with a 0.22 µm filter. The filtrate was adjusted to pH 7.0 with sodium phosphate dibasic.

[0237] PURIFICATION: Molecule pJB0169 was initially captured from clarified lysate and purified by Protein-L Chromatography (TOYOPEARL AF-rProtein L-650F). Subsequently, IMAC chromatography (GE IMAC Sepharose 6 FF) was used to select for the N-terminal His6-tag (SEQ ID NO: 794), then C-tag affinity chromatography (CaptureSelect C-tagXL Affinity Matrix) was used to select for the C-terminal EPEA-tag (SEQ ID NO: 796). Anion exchange chromatography (BIA CIMmultus QA monolith) was used to remove HMWCs and to polish to final purity.

[0238] ANALYTICS: The aggregation state of the process intermediates was monitored by SEC-HPLC. The SEC-HPLC method was performed using a Phenomenex 3 µm SEC-4000 300 × 7.8 mm (P/N 00H-4514-K0), a 20-minute isocratic method, at 1 mL/min, while monitoring the absorbance at 220 nm. pJB0169 monomer elutes from the analytical column at 6.2 minutes, and HMWC elute from 4.8-6.0 minutes. SEC-HPLC quality was measured as the relative area under the curve at 6.2 minutes versus the total area under the curve from 4.8-6.4 minutes.

[0239] Results: Aggregation summary (SEC-HPLC % monomer) for construct pJB0169 following each unit operation are presented in Table 16. Recovery of ≥ 95% monomer was the quality threshold upon final polishing as the criterion for considering a molecule stable or processable.

TABLE 16

Analytic Results

| | | |
|---|---|---|
| Unit Operation Number | Unit Operation Description | pJB0169 αEGFR.2-αCD3.9 |
| 1 | Clarified lysate | 26.7% |
| 2 | Protein L eluate | 40.7% |
| 3 | IMAC eluate | 52.8% |
| 4 | C-tag eluate | 71.0% |
| 5 | AEX eluate | 99.9% |
| | | stable |

[0240] CONCLUSIONS: Construct pJB0169 was purified to the target monomeric quality by SEC-HPLC (≥ 95% monomer), indicating that the construct is stable and compatible with both recovery and purification operations.

[0241] STABILITY IMPROVEMENT AND ASSESSMENT: New scFv’s (anti-EGFR.23 and anti-CD3.32) were designed for improved stability via (1) reduction of surface hydrophobicity and (2) reduction of isoelectric point differences between the paired scFv molecules (fused by a short peptide linker) by substitution of amino acids at select locations. Constructs pAH0025 and pAH0026 represent design iterations on pJB0169, where pAH0025 contains the anti-CD3.32 scFv variant, and pAH0026 contains both the anti-CD3.32 scFv variant and the EGFR.23 scFv variant. Constructs pAH0025 and pAH0026 would be expressed, clarified, purified, and analyzed as above; the SEC-HPLC results throughout the purification would be monitored and compared to pJB0169 or other constructs (e.g., αEGFR.2-αCD3.23) to assess relative stability. New design pairings may be more stable than a corresponding αEGFR.2-αCD3.23 construct (such as a molecule which, from the N-terminus to the C-terminus consists of an N-terminal polyhistidine tag (His6) (SEQ ID NO: 794), an unstructured 292 amino acid chain (XTEN_AE292), a protease cleavable release segment (RS), an anti-EGFR scFv (aEGFR.2), an anti-CD3 scFv (aCD3.23), another protease cleavable release segment (RS), an unstructured 864 amino acid chain, and four C-terminal residues - glutamic acid, proline, glutamic acid, alanine (C-tag) (XTEN_AE868)). The pAH0025 and pAH0026 constructs may also be expected to show concomitant improvement in percent monomer content, as measured by SEC-HPLC, following the unit operations tabulated below or a subset thereof (Table 17). Any construct that meets the purity target of ≥ 95% monomer would be considered stable or processable.

TABLE 17

Analytic Results

| Unit Operation Number | Unit Operation Description | SEC-HPLC quality (% monomer) | | |
|---|---|---|---|---|
| | | pJB0169 αEGFR.2-αCD3.9 | pAH0025 αEGFR.2-αCD3.32 | pAH0026 αEGFR.23-αCD3.32 |
| 1 | Clarified lysate | 26.7% | TBD | TBD |
| 2 | Protein L eluate | 40.7% | TBD | TBD |
| 3 | IMAC eluate | 52.8% | TBD | TBD |
| 4 | C-tag eluate | 71.0% | TBD | TBD |
| 5 | AEX eluate | 99.9% | TBD | TBD |
| | | stable | TBD | TBD |

### Example 4: Binding Affinity of anti-EpCAM × anti-CD3 Bispecific Antigen Binding Polypeptide Composition.

[0242] The binding affinity of anti-EpCAM × anti-CD3 bispecific antigen binding polypeptide constructs pJB0189 and pCW1645 to human EpCAM and human CD3 was measured using flow cytometry with huEp-CHO 4-12B (CHO cell line transfected with human EpCAM) and Jurkat cells.

[0243] The binding constants for anti-EpCAM × anti-CD3 bispecific antigen binding polypeptide binding to EpCAM-expressing and CD3-expressing cells was measured by competition binding with a fluorescently-labeled, protease-treated bispecific antigen binding polypeptide. The fluorescently-labeled, protease-treated bispecific antigen binding polypeptide was made by conjugation of Alexa Fluor 647 C2 maleimide (Thermo Fisher, cat#A20347) to a cysteine-containing, protease-treated bispecific antigen binding polypeptide mutant (MMP-9 treated pCW1645). Binding experiments were performed on 10,000 cells at 4° C. for 1 hour in a total volume of 100 microL of binding buffer (2% FCS, 5 mM EDTA, HBSS). Cells were washed once with cold binding buffer, then re-suspended in 1% formaldehyde in phosphate-buffered saline and immediately analyzed on a Millipore Guava easyCyte flow cytometer. Binding of the fluorescently labeled, protease-treated pCW1645 was found to have an apparent K_{d} value of 1 nM to hEp-CHO 4-12B and 4 nM to CD3+ Jurkat cells.

[0244] Competition binding experiments were performed on 10,000 hEp-CHO 4-12B cells with 1.5 nM fluorescently-labeled, protease-treated pCW1645 at 4° C. for 1 hour in a total volume of 100 microL of binding buffer (2% FCS, 5 mM EDTA, HBSS). Cells were washed once with cold binding buffer, then re-suspended in 1% formaldehyde in phosphate-buffered saline and immediately analyzed on a Millipore Guava easyCyte flow cytometer. Competition binding of fluorescently-labeled, protease-treated pCW1645 to hEp-CHO 4-12B cells with cleaved bispecific antigen binding polypeptide (pJB0189 hEp.2-hCD3.9 or AC1984 hEp.2-hCD3.23) resulted in apparent binding constants of 0.5 nM for hEp.2 (panitumimab).

[0245] Competition binding experiments were performed on 10,000 Jurkat cells with 10 nM fluorescently-labeled, protease-treated pCW1645 at 4° C. for 1 hour in a total volume of 100 microL of binding buffer (2% FCS, 5 mM EDTA, HBSS). Cells were washed once with cold binding buffer, then re-suspended in 1% formaldehyde in phosphate-buffered saline and immediately analyzed on a Millipore Guava easyCyte flow cytometer. Competition binding of fluorescently-labeled, protease-treated pCW1645 to Jurkat cells with cleaved bispecific antigen binding polypeptide (pJB0189 hEp.2-hCD3.9 or AC1984 hEp.2-hCD3.23) resulted in apparent binding constants of 75 nM for hCD3.9 and 300 nM for hCD3.23 for CD3 binding and 0.5 nM for EpCAM binding.

[0246] Conclusions: The binding affinity of CD3.23 for CD3 on Jurkat cells is 300 nM, which is 4-fold weaker than the affinity of CD3.9. The binding affinity of hEp.2 for EpCAM on Jurkat cells is 0.5 nM.

### Example 5: Binding Affinity of anti-EGFR × anti-CD3 Bispecific Antigen Binding Polypeptide Composition.

[0247] The binding affinity of anti-EGFR × anti-CD3 bispecific antigen binding polypeptide constructs to human EGFR and human CD3 are measured using flow cytometry with EGFR positive human cells selected from HT-29, HCT-116, NCI-H1573, NCI-H1975, and Jurkat cells for CD3.

[0248] The binding constants for anti-EGFR × anti-CD3 bispecific antigen binding polypeptide binding to EGFR-expressing and CD3-expressing cells are measured by competition binding with a fluorescently labeled, protease-treated bispecific antigen binding polypeptide. The fluorescently labeled bispecific antigen binding polypeptide is made by conjugation of Alexa Fluor 647 C2 maleimide (Thermo Fisher, cat#A20347) to a cysteine-containing bispecific antigen binding polypeptide mutant (MMP-9 treated pJB0297) with hEGFR.2-hCD3.23 and two XTEN. The fluorescently-labeled, protease-treated bispecific antigen binding polypeptide is made by conjugation of Alexa Fluor 647 C2 maleimide (Thermo Fisher, cat#A20347) to a cysteine-containing, protease-treated bispecific antigen binding polypeptide mutant (MMP-9 treated pJB0297). Binding experiments are performed on 10,000 cells at 4° C. for 1 hour in a total volume of 100 microL of binding buffer (2% FCS, 5 mM EDTA, HBSS). Cells are washed once with cold binding buffer, then re-suspended in 1% formaldehyde in phosphate-buffered saline and immediately analyzed on a Millipore Guava easyCyte flow cytometer. Binding of the fluorescently-labeled, protease-treated pJB0297 is expected to have an apparent K_{d} value in the low nM concentration to hEGFR bearing cells and about 300 nM to CD3+ Jurkat cells. Binding of the fluorescently-labeled pJB0297 with two XTEN is expected to have an apparent K_{d} value about 10- to 100-fold weaker than for fluorescently-labeled, protease-treated bispecific antigen binding polypeptide to hEGFR bearing cells and CD3+ Jurkat cells.

[0249] Competition binding experiments are performed on 10,000 hEGFR cells at a concentration of fluorescently-labeled, protease-treated pJB0297 close to the K_{d} from the previously described binding experiment at 4° C. for 1 hour in a total volume of 100 microL of binding buffer (2% FCS, 5 mM EDTA, HBSS). Cells are washed once with cold binding buffer, then re-suspended in 1% formaldehyde in phosphate-buffered saline and immediately analyzed on a Millipore Guava easyCyte flow cytometer. Competition binding of fluorescently-labeled, protease-treated pJB0297 to hEGFR cells with pJB0244 bispecific antigen binding polypeptide is expected to have an apparent binding constant similar to the direct binding constant of fluorescently-labeled pJB0297.

[0250] Competition binding experiments are performed on 10,000 Jurkat cells with about 300 nM (or a concentration close to the K_{d} from the previously described binding experiment) of fluorescently-labeled, protease-treated pJB0297 at 4° C. for 1 hour in a total volume of 100 microL of binding buffer (2% FCS, 5 mM EDTA, HBSS). Cells are washed once with cold binding buffer, then re-suspended in 1% formaldehyde in phosphate-buffered saline and immediately analyzed on a Millipore Guava easyCyte flow cytometer. Competition binding of fluorescently-labeled, protease-treated pJB0297 to Jurkat cells with pJB0244 bispecific antigen binding polypeptide is expected to have an apparent binding constant similar to the direct binding constant of fluorescently-labeled pJB0297, which is expected to be in the low micromolar to nanomolar concentration range.

### Example 6: Enzyme Activation, Storage and Digestion of RSR-1517-containing XTEN AC1611 (RSR-1517).

[0251] This example demonstrates that RSR-1517-containing XTEN construct AC1611, can be cleaved by various tumor-associated proteases including recombinant human uPA, matriptase, legumain, MMP-2, MMP-7, MMP-9, and MMP-14, in test tubes. The amino acid sequence of AC1611 is presented in Table 18, below.

### 1. Enzyme Activation

[0252] All enzymes used were obtained from R&D Systems. Recombinant human u-plasminogen activator (uPA) and recombinant human matriptase were provided as activated enzymes and stored at -80° C. until use. Recombinant mouse MMP-2, recombinant human MMP-7, and recombinant mouse MMP-9 were supplied as zymogens and required activation by 4-aminophenylmercuric acetate (APMA). APMA was first dissolved in 0.1 M NaOH to a final concentration of 10 mM before the pH was readjusted to neutral using 0.1 M HCl. Further dilution of the APMA stock to 2.5 mM was done in 50 mM Tris pH 7.5, 150 mM NaCl, 10 mM CaCl2. To activate pro-MMP, 1 mM APMA and 100 µg/mL of pro-MMP in 50 mM Tris pH 7.5, 150 mM NaCl, 10 mM CaCl2 were incubated at 37° C. for 1 hour (MMP-2, MMP-7) or 24 hours (MMP-9). To activate MMP-14, 0.86 µg/mL recombinant human furin and 40 µg/mL pro-MMP-14 in 50 mM Tris pH 9, 1 mM CaCl2 were incubated at 37° C. for 1.5 hours. To activate legumain, 100 µg/mL pro-legumain in 50 mM sodium acetate pH 4, 100 mM NaCl were incubated at 37° C. for 2 hours. 100% Ultrapure glycerol were added to all activated enzymes (including uPA and MTSP1) to a final concentration of 50% glycerol, then be stored at -20° C. for several weeks.

### 2. Enzymatic Digestion

[0253] A panel of enzymes was tested to determine cleavage efficiency of each enzyme for AC1611. 6 µM of the substrate was incubated with each enzyme in the following enzyme-to-substrate molar ratios and conditions: uPA (1:25 in 50 mM Tris pH 8.5), matriptase (1:25 in 50 mM Tris pH 9, 50 mM NaCl), legumain (1:20 in 50 mM MES pH 5, 250 mM NaCl), MMP-2 (1:1200 in 50 mM Tris pH 7.5, 150 mM NaCl, 10 mM CaCl2), MMP-7 (1:1200 in 50 mM Tris pH 7.5, 150 mM NaCl, 10 mM CaCl2), MMP-9 (1:2000 in 50 mM Tris pH 7.5, 150 mM NaCl, 10 mM CaCl2), and MMP-14 (1:30 in 50 mM Tris pH 8.5, 3 mM CaCl2, 1 µM ZnCl2) in 20 uL reactions. Reactions were incubated at 37° C. for two hours before stopped by adding EDTA to 20 mM in the case of MMP reactions, heating at 85° C. for 15 minutes in the case of uPA and matriptase reactions, and adjusting pH to 8.5 in the case of legumain.

### 3. Analysis of Cleavage Efficiency.

[0254] Analysis of the samples to determine percentage of cleaved product was performed by loading 2 µL of undigested substrate (at 12 µM) and 4 µL digested (at 6 µM) reaction mixture on SDS-PAGE and staining with Stains-All (Sigma Aldrich), as shown on FIG. 75. ImageJ software was used to analyze corresponding band intensity and determine percent of cleavage. Upon cleavage by various proteases at the release segment, the substrate RSR-1517-containing XTEN would yield two fragments, and the larger fragment was utilized in % cleavage calculations (quantity of reaction product divided by total initial substrate went into the reaction) while band intensity of the smaller product is too low to quantify. The percentage of cleavage of AC1611 under the current standard experimental conditions is 31%, 14%, 16%, 40%, 51%, 38%, 30%, for uPA, matriptase, legumain, MMP-2, MMP-7, MMP-9, MMP-14, respectively.

[0255] Conclusions: We selected a particular release segment RSR-1517 (amino acid sequence EAGRSANHEPLGLVAT (SEQ ID NO: 53)) and determined its cleavage profile as defined by percentage of cleavage under current standard experimental condition for all seven enzymes. This release segment has intermediate cleavage efficiency for all enzymes so that during screening, cleavage of faster or slower variants will fall within the assay window to allow accurate ranking.

TABLE 18

Amino acid sequence of AC1611 with Release Segment RSR-1617

| | |
|---|---|
| Construct Name | Amino Acid Sequence* |
| AC1611 | MKNPEQAEEQAEEQREETGKPIPNPLLGLDSTEGTSTEPSEGSAPGTSESATPESGPGT SESATPESGPGTSESATPESGPGSEPATSGSETPGSEPATSGSETPGSPAGSPTSTEEG TSTEPSEGSAPGTSTEPSEGSAPGSEPATSGSETPGTSESATPESGPGTAEAASASGEA GRSANHEPLGLVATPGSPAGSPTSTEEGTSESATPESGPGTSTEPSEGSAPGSPAGSPT STEEGTSTEPSEGSAPGTSTEPSEGSAPGTSESATPESGPGSEPATSGSETPGSEPATS GSETPGSPAGSPTSTEEGTSESATPESGPGTSTEPSEGSAPGTSTEPSEGSAPGSPAGS PTSTEEGTSTEPSEGSAPGTSTEPSEGSAPGTSESATPESGPGTSTEPSEGSAPGTSES ATPESGPGSEPATSGSETPGTSTEPSEGSAPGTSTEPSEGSAPGTSESATPESGPGTSE SATPESGPGSPAGSPTSTEEGTSESATPESGPGSEPATSGSETPGTSESATPESGPGTS TEPSEGSAPGTSTEPSEGSAPGTSTEPSEGSAPGTSTEPSEGSAPGTSTEPSEGSAPGT STEPSEGSAPGSPAGSPTSTEEGTSTEPSEGSAPGTSESATPESGPGSEPATSGSETPG TSESATPESGPGSEPATSGSETPGTSESATPESGPGTSTEPSEGSAPGTSESATPESGP GSPAGSPTSTEEGSPAGSPTSTEEGSPAGSPTSTEEGTSESATPESGPGTSTEPSEGSA PGTSESATPESGPGSEPATSGSETPGTSESATPESGPGSEPATSGSETPGTSESATPES GPGTSTEPSEGSAPGSPAGSPTSTEEGTSESATPESGPGSEPATSGSETPGTSESATPE SGPGSPAGSPTSTEEGSPAHHHHHHHH (SEQ ID NO: 941) |

### Example 7: Screening Release Segment Using RSR-1517 (AC1611) as Control

[0256] Here we select uPA as the example to show how the release segment screening was performed. The same procedure was applied to all seven tumor-associated proteases to define the relative cleavage profile for each substrate, which is a seven number array to describe how well it can be cleaved for each enzyme, when compared to the control substrate RSR-1517. All polypeptides of Table 19 had the amino acid sequence of AC1611, but with the substitution of the release segment peptide of the indicated construct swapped in for the EAGRSANHEPLGLVAT sequence of AC1611 (SEQ ID NO: 53); e.g., BSRS-4 has a release segment sequence of LAGRSDNHSPLGLAGS (SEQ ID NO: 945) but otherwise has complete sequence identity to AC1611.

### 1. Enzymatic Digestion

[0257] All release segment-containing XTEN variants and the control AC1611 were diluted to 12 µM in 50 mM Tris pH 7.5, 150 mM NaCl, 10 mM CaCl2 in individual Eppendorf tubes. A master mix of uPA was prepared so that after 1:1 mixing with each substrate, the total reaction volume is 20 µL, the initial substrate concentration is 6 µM, and the enzyme-to-substrate ratio was varied between 1:20 to 1:3000, depending on the enzyme, in order to have reaction products and uncleaved substrate that could be visualized at the endpoint. All reactions were incubated at 37° C. for two hours before stopped by adding EDTA to a final concentration of 20 mM. All products were analyzed by non-reducing SDS-PAGE followed by Stains-All. For each gel, AC1611 digestion product was always included as the staining control to normalize differential staining between different gels.

### 2. Relative Cleavage Efficiency Calculation

[0258] Percentage of cleavage for individual substrate was analyzed by ImageJ software and calculated as described before. For each variant, the relative cleavage efficiency is calculated as follows:

$$L o {g}_{2} \left(\frac{\% C l e a v e d f o r s u b s t r a t e o f i n t e r e s t}{\% c l e a v e d f o r A C 1611 i n t h e s a m e e x p e r i m e n t}\right)$$

[0259] A +1 value in relative cleavage efficiency indicates the substrate yielded twice as much product when compared to the AC1611 control while a -1 value in relative cleavage efficiency indicates the substrate yielded only 50% as much product when compared to the AC1611 control, under the experimental condition specified above.

[0260] In this experiment, the percentage of cleavage (% cleaved) for AC1611 is 20%, as quantified by ImageJ. The substrates being screened in this experiment demonstrated 21%, 39%, 1%, 58%, 24%, 6%, 15%, 1%, 1%, and 25% cleavage, where 1% essentially represents below detection limit and does not indicate accurate values. The relative cleavage efficiencies calculated based on the formula above were 0.08, 0.95, -4.34, 1.51, 0.26, -1.76, -0.47, -4.34, -4.34, and 0.32, respectively.

[0261] Conclusions: We determined relative cleavage efficiencies of 10 release segment variants when subject to uPA when compared to AC1611 in the same experiment. Following similar procedures, we determined the cleavage profiles of 134 release segments, the results of which are listed in Table 19, using RSR1517 (AC1611) as the reference control. These release segments covers a wide range of cleavage efficiency for individual enzyme as well as combinations. For example, RSR-1478 has a -2.00 value for MMP-14, meaning that this substrate yielded only 25% of product compared to the reference control RSR-1517 when digested with MMP-14. Certain release segments, such as RSR-1951, appear to be better substrate for all seven proteases tested. These faster release segments may prove to be useful in the clinic if the systemic toxicity is low/manageable while efficacy (partially depending on how fast cleavage happens to render bispecific antigen binding composition as the activated form) needs improvement.

TABLE 19

Cleavage profiles of Release Segment when subjected to seven human proteases using RSR-1517 as control

| RS ID | AC# | AA Sequence | SEQ ID NO: | uPA | Matriptase | Leguman | MMP-2 | MMP-7 | MMP-9 | MMP-14 |
|---|---|---|---|---|---|---|---|---|---|---|
| RSR-1517 | AC1611 | EAGRSANHEPLGLVAT | 53 | 0.00 | 0.00 | 0.00 | 0.00 | 0.00 | 0.00 | 0.00 |
| BSRS-4 | AC1602 | LAGRSDNHSPLGLAGS | 945 | -0.99 | 1.69 | 0.48 | 0.09 | -0.49 | -0.04 | -0.58 |
| BSRS-5 | AC1603 | LAGRSDNHVPLSLSMG | 942 | -1.40 | 1.76 | 0.56 | -0.52 | 0.00 | -0.75 | -0.21 |
| BSRS-6 | AC1604 | LAGRSDNHEPLELVAG | 943 | -2.71 | 0.47 | 0.23 | -1.26 | 0.00 | -1.16 | -2.79 |
| BSRS-A1 | AC1605 | ASGRSTNAGPSGLAGP | 54 | 1.43 | 2.77 | 0.09 | -0.16 | -2.18 | 0.03 | -1.24 |
| BSRS-A2 | AC1606 | ASGRSTNAGPQGLAGQ | 55 | 1.36 | 2.77 | -0.14 | 0.09 | -2.64 | 0.03 | -1.03 |
| BSRS-A3 | AC1607 | ASGRSTNAGPPGLTGP | 56 | 1.49 | 2.77 | 0.05 | -1.07 | -3.47 | -1.82 | -3.59 |
| VP-1 | AC1608 | ASSRGTNAGPAGLTGP | 57 | -2.19 | 1.16 | 0.90 | 0.09 | -1.22 | 0.23 | 0.00 |
| RSR-1752 | AC1609 | ASSRTTNTGPSTLTGP | 58 | -0.55 | 0.70 | 0.29 | -0.34 | -1.29 | -0.94 | -5.38 |
| RSR-1512 | AC1610 | AAGRSDNGTPLELVAP | 59 | -2.96 | 1.51 | 0.56 | -1.43 | -0.45 | -1.09 | -3.91 |
| RSR-1517 | AC1611 | EAGRSANHEPLGLVAT | 53 | 0.00 | 0.00 | 0.00 | 0.00 | 0.00 | 0.00 | 0.00 |
| VP-2 | AC1612 | ASGRGTNAGPAGLTGP | 60 | -0.70 | 1.38 | 1.12 | 0.00 | -0.58 | 0.23 | -0.15 |
| RSR-1018 | AC1613 | LFGRNDNHEPLELGGG | 61 | -4.62 | -0.53 | 1.36 | -0.73 | -0.43 | -2.56 | -1.79 |
| RSR-1053 | AC1614 | TAGRSDNLEPLGLVFG | 62 | -3.21 | -0.12 | -0.13 | 0.09 | -0.03 | 0.25 | -0.19 |
| RSR-1059 | AC1615 | LDGRSDNFHPPELVAG | 63 | -4.62 | -0.89 | 0.56 | -3.10 | -2.62 | -5.14 | -6.49 |
| RSR-1065 | AC1616 | LEGRSDNEEPENLVAG | 64 | -4.62 | -2.70 | 0.43 | -1.84 | -1.00 | -3.14 | -1.85 |
| RSR-1167 | AC1617 | LKGRSDNNAPLALVAG | 65 | -4.62 | 3.35 | 1.32 | 0.09 | 0.22 | 1.18 | 0.06 |
| RSR-1201 | AC1618 | VYSRGTNAGPHGLTGR | 66 | -3.02 | 2.35 | 1.25 | 0.09 | -1.30 | 0.79 | -0.30 |
| RSR-1218 | AC1619 | ANSRGTNKGFAGLIGP | 67 | -0.52 | 2.66 | 1.74 | -0.30 | 0.00 | -1.33 | -1.60 |
| RSR-1226 | AC1620 | ASSRLTNEAPAGLTIP | 68 | -0.98 | 0.29 | 0.58 | 0.07 | -0.43 | -2.33 | -0.42 |
| RSR-1254 | AC1621 | DQSRGTNAGPEGLTDP | 69 | -1.27 | -1.17 | 1.00 | -3.10 | -2.32 | -4.14 | -2.92 |
| RSR-1256 | AC 1622 | ESSRGTNIGQGGLTGP | 70 | -1.65 | -0.58 | 0.27 | -2.26 | -3.32 | -5.14 | -5.51 |
| RSR-1261 | AC1623 | SSSRGTNQDPAGLTIP | 71 | -1.77 | -0.36 | 0.62 | -1.14 | -1.25 | -3.56 | -0.98 |
| RSR-1293 | AC1624 | ASSRGQNHSPMGLTGP | 72 | -4.69 | 2.15 | 0.91 | -0.70 | -0.01 | 1.30 | -0.67 |
| RSR-1309 | AC1625 | AYSRGPNAGPAGLEGR | 73 | -4.69 | 0.53 | 0.74 | -0.70 | -2.25 | 0.86 | 0.02 |
| RSR-1326 | AC1626 | ASERGNNAGPANLTGF | 74 | -0.27 | 1.27 | 1.64 | -0.85 | -0.74 | 0.28 | -0.13 |
| RSR-1345 | AC1627 | ASHRGTNPKPAILTGP | 75 | 0.42 | ND | ND | ND | ND | -0.50 | ND |
| RSR-1354 | AC1628 | MSSRRTNANPAQLTGP | 76 | 1.07 | 2.82 | 0.36 | -0.77 | -0.64 | -1.82 | -1.87 |
| RSR-1426 | AC1629 | GAGRTDNHEPLELGAA | 77 | -2.36 | -0.65 | -0.19 | -2.82 | -0.18 | -0.11 | -4.07 |
| RSR-1478 | AC1630 | LAGRSENTAPLELTAG | 78 | -2.06 | 1.18 | 0.54 | -0.82 | 0.00 | 1.73 | -2.00 |
| RSR-1479 | AC1631 | LEGRPDNHEPLALVAS | 79 | -3.47 | -3.46 | 0.12 | -0.74 | 0.00 | 2.05 | 0.02 |
| RSR-1496 | AC1632 | LSGRSDNEEPLALPAG | 80 | -3.48 | -1.46 | 0.22 | -2.81 | -5.06 | -3.20 | -3.22 |
| RSR-1508 | AC1633 | EAGRTDNHEPLELSAP | 81 | -2.74 | -1.46 | -0.26 | -1.48 | 0.00 | 0.56 | -2.93 |
| RSR-1513 | AC1634 | EGGRSDNHGPLELVSG | 82 | -2.81 | -1.87 | 0.27 | -0.90 | 0.00 | 1.29 | -3.81 |
| RSR-1516 | AC1635 | LSGRSDNEAPLELEAG | 83 | -3.71 | -1.87 | 0.70 | -1.69 | -0.09 | -1.39 | -3.22 |
| RSR-1524 | AC1636 | LGGRADNHEPPELGAG | 84 | -0.84 | 1.12 | 0.95 | -1.22 | -2.84 | -0.74 | -2.57 |
| RSR-1622 | AC1637 | PPSRGTNAEPAGLTGE | 85 | -4.66 | -3.46 | 0.62 | -0.70 | -1.09 | 0.93 | -0.78 |
| RSR-1629 | AC1638 | ASTRGENAGPAGLEAP | 86 | -4.66 | -1.14 | 1.09 | -0.70 | -1.74 | 0.19 | -0.25 |
| RSR-1664 | AC1639 | ESSRGTNGAPEGLTGP | 87 | -4.66 | -3.46 | 0.32 | -1.18 | -0.76 | -0.76 | -2.31 |
| RSR-1667 | AC1640 | ASSRATNESPAGLTGE | 88 | -3.05 | 2.00 | 0.46 | -0.93 | -1.25 | -0.97 | -0.83 |
| RSR-1709 | AC1641 | ASSRGENPPPGGLTGP | 89 | -2.64 | 0.77 | -1.00 | -0.93 | -2.06 | -0.76 | -1.72 |
| RSR-1712 | AC1642 | AASRGTNTGPAELTGS | 90 | -4.07 | -0.51 | 0.66 | -0.93 | -0.64 | 0.29 | -0.19 |
| RSR-1727 | AC1643 | AGSRTTNAGPGGLEGP | 91 | -3.55 | -0.51 | 0.32 | -1.58 | -4.84 | -3.08 | -1.78 |
| RSR-1754 | AC1644 | APSRGENAGPATLTGA | 92 | -4.68 | -3.32 | 1.06 | 0.19 | -1.40 | -1.50 | -0.17 |
| RSR-1819 | AC1645 | ESGRAANTGPPTLTAP | 93 | 1.20 | 0.79 | -0.70 | -3.41 | -5.64 | -4.67 | -6.92 |
| RSR-1832 | AC1646 | NPGRAANEGPPGLPGS | 94 | -3.62 | 0.58 | 0.81 | -4.39 | -6.64 | -4.67 | -6.48 |
| RSR-1855 | AC1647 | ESSRAANLTPPELTGP | 95 | -0.08 | -1.62 | 0.77 | -3.07 | -3.47 | -4.67 | -2.92 |
| RSR-1911 | AC1648 | ASGRAANETPPGLTGA | 96 | 0.99 | 2.20 | 0.56 | -1.29 | -3.84 | -1.39 | -3.11 |
| RSR-1929 | AC1649 | NSGRGENLGAPGLTGT | 97 | -1.68 | ND | ND | ND | ND | -3.08 | ND |
| RSR-1951 | AC1650 | TTGRAANLTPAGLTGP | 98 | 1.94 | 2.57 | 0.39 | 0.09 | -0.09 | 0.13 | -0.42 |
| RSR-2295 | AC1761 | EAGRSANHTPAGLTGP | 99 | 0.40 | 1.48 | 0.01 | 1.20 | 0.35 | 0.13 | 0.97 |
| RSR-2298 | AC1762 | ESGRAANTTPAGLTGP | 100 | 1.01 | 0.86 | 0.55 | 1.24 | 0.24 | 0.07 | 1.03 |
| RSR-2038 | AC1679 | TTGRATEAANLTPAGLTGP | 101 | 4.75 | 1.00 | 0.81 | 0.86 | 0.10 | 0.15 | 0.27 |
| RSR-2072 | AC1680 | TTGRAEEAANLTPAGLTGP | 102 | 0.00 | -0.49 | 1.00 | 0.86 | 0.11 | -0.12 | 0.27 |
| RSR-2089 | AC1681 | TTGRAGEAANLTPAGLTGP | 103 | 3.91 | 2.05 | 0.32 | 0.85 | 0.02 | -0.04 | 0.27 |
| RSR-2302 | AC1682 | TTGRATEAANATPAGLTGP | 104 | 4.73 | 0.65 | 0.00 | 0.74 | -0.48 | -0.35 | 0.10 |
| RSR-3047 | AC1697 | TTGRAGEAEGATSAGATGP | 105 | | | | | | | |
| RSR-3052 | AC1698 | TTGEAGEAANATSAGATGP | 106 | | | | | | | |
| RSR-3043 | AC1699 | TTGEAGEAAGLTPAGLTGP | 107 | | | | | | | |
| RSR-3041 | AC1700 | TTGAAGEAANATPAGLTGP | 108 | | | | | | | |
| RSR-3044 | AC1701 | TTGRAGEAAGLTPAGLTGP | 109 | | | | | | | |
| RSR-3057 | AC1702 | TTGRAGEAANATSAGATGP | 110 | | | | | | | |
| RSR-3058 | AC1703 | TTGEAGEAAGATSAGATGP | 111 | | | | | | | |
| RSR-2485 | AC1763 | ESGRAANTEPPELGAG | 112 | 0.61 | -0.90 | 0.15 | -5.82 | -6.27 | -5.36 | -5.64 |
| RSR-2486 | AC1764 | ESGRAANTAPEGLTGP | 113 | 1.03 | 0.24 | 0.95 | 0.30 | 0.37 | -0.33 | -0.74 |
| RSR-2488 | AC1688 | EPGRAANHEPSGLTEG | 114 | -3.27 | -1.21 | -1.30 | -0.73 | -0.91 | -1.86 | -0.88 |
| RSR-2599 | AC1706 | ESGRAANHTGAPPGGLTGP | 115 | 1.70 | 1.02 | 0.36 | 0.68 | -1.49 | -0.71 | -2.04 |
| RSR-2706 | AC1716 | TTGRTGEGANATPGGLTGP | 116 | 0.07 | 0.83 | 1.17 | -0.04 | -2.25 | -2.25 | 0.00 |
| RSR-2707 | AC1717 | RTGRSGEAANETPEGLEGP | 117 | 1.95 | 3.25 | 0.96 | -1.96 | -2.75 | -5.00 | -1.39 |
| RSR-2708 | AC1718 | RTGRTGESANETPAGLGGP | 118 | 1.24 | 3.25 | 0.88 | -0.37 | -3.55 | -4.00 | -0.49 |
| RSR-2709 | AC1719 | STGRTGEPANETPAGLSGP | 119 | -0.14 | 0.38 | 0.40 | 0.35 | -1.03 | -1.68 | 1.86 |
| RSR-2710 | AC1720 | TTGRAGEPANATPTGLSGP | 120 | -0.21 | 2.04 | 0.56 | 0.15 | -3.23 | -1.83 | -0.07 |
| RSR-2711 | AC1721 | RTGRPGEGANATPTGLPGP | 121 | 0.58 | 3.22 | 1.45 | -6.04 | -5.55 | -5.00 | -4.39 |
| RSR-2712 | AC1722 | RTGRGGEAANATPSGLGGP | 122 | 0.86 | 3.15 | 1.21 | -0.34 | -3.97 | -2.68 | -1.58 |
| RSR-2713 | AC1723 | STGRSGESANATPGGLGGP | 123 | 0.96 | 2.22 | 0.78 | -5.04 | -5.25 | -5.25 | -3.32 |
| RSR-2714 | AC 1724 | RTGRTGEEANATPAGLPGP | 124 | 0.83 | 3.23 | 0.96 | -4.46 | -5.55 | -5.00 | -4.39 |
| RSR-2715 | AC1725 | ATGRPGEPANTTPEGLEGP | 125 | -4.32 | -3.17 | 0.46 | -1.34 | -1.93 | -1.93 | -1.32 |
| RSR-2716 | AC1726 | STGRSGEPANATPGGLTGP | 126 | 1.00 | 2.41 | 0.51 | -0.46 | -3.55 | -2.68 | -1.22 |
| RSR-2717 | AC1727 | PTGRGGEGANTTPTGLPGP | 127 | -0.21 | 1.54 | 1.28 | -6.04 | -5.55 | -5.00 | -4.39 |
| RSR-2718 | AC1728 | PTGRSGEGANATPSGLTGP | 128 | 1.54 | 3.40 | 1.29 | 1.30 | -0.20 | -0.20 | 1.63 |
| RSR-2719 | AC1729 | TTGRASEGANSTPAPLTEP | 129 | 0.26 | 1.15 | 1.30 | -1.46 | -0.16 | -0.16 | 1.68 |
| RSR-2720 | AC1730 | TYGRAAEAANTTPAGLTAP | 130 | -1.65 | 2.14 | 1.21 | 0.56 | 0.45 | 0.21 | 2.25 |
| RSR-2721 | AC1731 | TTGRATEGANATPAELTEP | 131 | 0.77 | -0.85 | 1.25 | -2.44 | 0.00 | -4.91 | -3.75 |
| RSR-2722 | AC1732 | TVGRASEEANTTPASLTGP | 132 | -1.74 | -1.17 | 0.39 | 1.08 | 1.00 | 1.00 | 2.14 |
| RSR-2723 | AC1733 | TTGRAPEAANATPAPLTGP | 133 | -0.42 | -3.17 | 1.32 | 0.76 | 0.66 | 0.66 | 2.17 |
| RSR-2724 | AC1734 | TWGRATEPANATPAPLTSP | 134 | -4.32 | 1.00 | 0.55 | 0.81 | 0.42 | 0.42 | 2.58 |
| RSR-2725 | AC1735 | TVGRASESANATPAELTSP | 135 | -4.32 | -0.17 | 0.86 | -0.02 | 0.45 | -1.74 | -2.17 |
| RSR-2726 | AC1736 | TVGRAPEGANSTPAGLTGP | 136 | -4.32 | -3.17 | 1.39 | 1.22 | 0.24 | 0.24 | 2.10 |
| RSR-2727 | AC1737 | TWGRATEAPNLEPATLTTP | 137 | -4.32 | 0.00 | -0.30 | -0.50 | 0.17 | -3.91 | -1.95 |
| RSR-2728 | AC1738 | TTGRATEAPNLTPAPLTEP | 138 | 0.32 | 0.83 | -0.61 | -0.80 | 0.45 | 0.45 | 2.00 |
| RSR-2729 | AC1739 | TQGRATEAPNLSPAALTSP | 139 | -4.52 | 1.73 | 0.37 | 1.75 | 0.93 | 0.93 | 2.85 |
| RSR-2730 | AC1740 | TQGRAAEAPNLTPATLTAP | 140 | -2.20 | 2.73 | 0.22 | 1.19 | 0.51 | 0.51 | 1.29 |
| RSR-2731 | AC1741 | TSGRAPEATNLAPAPLTGP | 141 | -1.72 | -2.70 | 1.22 | 1.57 | 0.92 | 0.92 | 2.32 |
| RSR-2732 | AC1742 | TQGRAAEAANLTPAGLTEP | 142 | -2.52 | 2.49 | 1.44 | 0.32 | -0.21 | -0.21 | 2.29 |
| RSR-2733 | AC1743 | TTGRAGSAPNLPPTGLTTP | 143 | 1.09 | 2.91 | 0.32 | 0.48 | -2.32 | -2.32 | -3.17 |
| RSR-2734 | AC1744 | TTGRAGGAENLPPEGLTAP | 144 | 0.83 | 2.00 | 0.66 | 0.55 | 0.55 | 0.55 | 1.83 |
| RSR-2735 | AC1745 | TTSRAGTATNLTPEGLTAP | 145 | 0.38 | 2.34 | 0.32 | 0.48 | 0.26 | 0.26 | 2.12 |
| RSR-2736 | AC1746 | TTGRAGTATNLPPSGLTTP | 146 | 1.03 | 2.91 | 0.17 | 1.34 | -1.10 | -1.10 | 1.42 |
| RSR-2737 | AC1747 | TTARAGEAENLSPSGLTAP | 147 | -0.20 | 0.30 | 0.37 | 1.57 | -0.03 | -0.03 | 2.35 |
| RSR-2738 | AC1748 | TTGRAGGAGNLAPGGLTEP | 148 | 1.68 | 3.37 | 1.03 | -1.32 | -1.65 | -2.10 | -1.05 |
| RSR-2739 | AC1749 | TTGRAGTATNLPPEGLTGP | 149 | 1.49 | 3.43 | 0.31 | -0.12 | 0.71 | -0.58 | -0.67 |
| RSR-2740 | AC1750 | TTGRAGGAANLAPTGLTEP | 150 | 1.77 | 3.38 | 1.49 | -1.02 | -0.75 | -1.32 | -0.43 |
| RSR-2741 | AC1751 | TTGRAGTAENLAPSGLTTP | 151 | 0.68 | 3.10 | 0.56 | 0.58 | -0.51 | -0.91 | 0.42 |
| RSR-2742 | AC1752 | TTGRAGSATNLGPGGLTGP | 152 | 1.43 | 3.42 | 0.51 | -0.27 | -3.23 | -2.32 | -0.17 |
| RSR-2743 | AC1753 | TTARAGGAENLTPAGLTEP | 153 | 1.63 | 2.19 | 0.78 | -0.50 | -0.13 | -2.58 | 1.18 |
| RSR-2744 | AC1754 | TTARAGSAENLSPSGLTGP | 154 | 1.04 | 2.32 | 0.65 | 0.59 | 0.00 | -0.15 | 0.49 |
| RSR-2745 | AC1755 | TTARAGGAGNLAPEGLTTP | 155 | 1.12 | 2.77 | 0.40 | -0.77 | -0.58 | -2.28 | -1.00 |
| RSR-2746 | AC1756 | TTSRAGAAENLTPTGLTGP | 156 | -0.81 | 1.54 | 0.18 | 0.42 | -0.85 | -1.50 | -0.26 |
| RSR-2747 | AC1757 | TYGRTTTPGNEPPASLEAE | 157 | -1.49 | 1.26 | 0.06 | -0.20 | -0.36 | -2.77 | -2.10 |
| RSR-2748 | AC1758 | TYSRGESGPNEPPPGLTGP | 158 | -4.81 | -2.32 | -0.76 | -0.28 | -2.68 | -2.28 | -2.91 |
| RSR-2749 | AC1759 | AWGRTGASENETPAPLGGE | 159 | -4.81 | 3.15 | 0.24 | -1.28 | -3.91 | -5.09 | -2.58 |
| RSR-2750 | AC1760 | RWGRAETTPNTPPEGLETE | 160 | -1.49 | 3.28 | -0.29 | -3.17 | -3.91 | -5.09 | -4.91 |
| RSR-2751 | AC1765 | ESGRAANHTGAEPPELGAG | 161 | 1.04 | 0.37 | 0.40 | -1.59 | -5.67 | -5.26 | -4.93 |
| RSR-2754 | AC1801 | TTGRAGEAANLTPAGLTES | 162 | | | | -0.15 | -0.82 | -3.61 | 0.45 |
| RSR-2755 | AC1802 | TTGRAGEAANLTPAALTES | 163 | | | | 0.06 | 0.29 | -2.91 | 0.62 |
| RSR-2756 | AC1803 | TTGRAGEAANLTPAPLTES | 164 | | | | -0.58 | -0.39 | -2.58 | 0.49 |
| RSR-2757 | AC1804 | TTGRAGEAANLTPEPLTES | 165 | | | | -1.59 | -0.27 | -1.89 | -0.52 |
| RSR-2758 | AC1805 | TTGRAGEAANLTPAGLTGA | 166 | | | | 0.70 | -0.43 | 0.17 | 0.85 |
| RSR-2759 | AC1806 | TTGRAGEAANLTPEGLTGA | 167 | | | | 0.04 | -0.72 | -1.06 | -0.18 |
| RSR-2760 | AC1807 | TTGRAGEAANLTPEPLTGA | 168 | | | | -0.06 | -0.12 | -1.90 | -0.15 |
| RSR-2761 | AC1808 | TTGRAGEAANLTPAGLTEA | 169 | | | | -0.06 | -0.55 | -3.71 | 0.69 |
| RSR-2762 | AC1809 | TTGRAGEAANLTPEGLTEA | 170 | | | | -2.14 | -0.69 | -4.30 | -0.59 |
| RSR-2763 | AC1810 | TTGRAGEAANLTPAPLTEA | 171 | | | | -0.76 | -0.31 | -5.28 | 0.64 |
| RSR-2764 | AC1811 | TTGRAGEAANLTPEPLTEA | 172 | | | | -2.18 | -0.06 | -5.28 | -0.11 |
| RSR-2765 | AC1812 | TTGRAGEAANLTPEPLTGP | 173 | | | | -0.31 | 0.07 | -5.28 | -5.63 |
| RSR-2766 | AC1813 | TTGRAGEAANLTPAGLTGG | 174 | | | | 0.77 | -0.61 | -5.28 | -5.63 |
| RSR-2767 | AC1814 | TTGRAGEAANLTPEGLTGG | 175 | | | | -0.20 | -0.85 | -1.26 | -0.25 |
| RSR-2768 | AC1815 | TTGRAGEAANLTPEALTGG | 176 | | | | -0.50 | 0.13 | -1.80 | -0.43 |
| RSR-2769 | AC1816 | TTGRAGEAANLTPEPLTGG | 177 | | | | -0.44 | -0.26 | -2.40 | -0.39 |
| RSR-2770 | AC1817 | TTGRAGEAANLTPAGLTEG | 178 | | | | -0.07 | -0.47 | -3.18 | 0.40 |
| RSR-2771 | AC1818 | TTGRAGEAANLTPEGLTEG | 179 | | | | -3.05 | -0.93 | -5.28 | -0.99 |
| RSR-2772 | AC1819 | TTGRAGEAANLTPAPLTEG | 180 | | | | -0.53 | -0.24 | -2.19 | 0.39 |
| RSR-2773 | AC1820 | TTGRAGEAANLTPEPLTEG | 181 | | | | -3.80 | -0.42 | -5.28 | -0.81 |
| BSRS-1 | AC1601 | LSGRSDNHSPLGLAGS | 944 | 0.89 | 1.94 | 0.10 | -0.67 | -2.12 | -0.50 | -1.92 |

ND=not determined

### Example 7: Competitive Digestion Using RSR-1517 as Internal Control

[0262] This competitive assay is developed to minimize any variability in enzyme concentration or reaction condition between reactions in different vials within the same experiment. In order to resolve both the control substrate and the RS of interest in the same example, new control plasmids are constructed.

### 1. Molecular Cloning of RSR-1517-containing Internal Control

[0263] Two internal control plasmids, AC1830 (HD2-V5-AE144-RSR-1517-XTEN288) and AC1840 (HD2-V5-AE144-RSR-1517-XTEN432), are constructed in a similar fashion as AC1611 described in Example 6, with the only difference in the length of the C-terminal XTEN.

### 2. Enzymatic Digestion

[0264] 2× substrate solution is prepared by mixing and diluting purified AC1830 or AC1840 and the RS of interest in assay buffer so that the final concentrations of individual substrates are 6 µM. An enzyme master mix is prepared so that after 1:1 mixing with 2× substrate solution, the total reaction volume is 20 µL, the final substrate concentration of each component is 3 µM, and the enzyme-to-substrate ratio is as selected in assay development. The reaction is incubated at 37° C. for 2 hours before stopped by procedures as described above.

### 3. Relative Cleavage Efficiency Calculation

[0265] The reaction mixture is analyzed by non-reducing 4-12% SDS-PAGE. Since the internal control and the substrate of interest have different molecular weight, once cleaved, four bands should be visible in the same sample lane. Percentage of cleavage for both can be calculated and the relative cleavage efficiency can be derived from the same formula in Example 6:

$$L o {g}_{2} \left(\frac{\% C l e a v e d f o r s u b s t r a t e o f i n t e r e s t}{\% c l e a v e d f o r A C 1611 i n t h e s a m e e x p e r i m e n t}\right)$$

[0266] The only difference is now both values are calculated from the reaction mixture in the same vial, while previously from two reactions sharing the same enzyme mix.

[0267] Conclusions: We expect this competitive digestion assay with RSR-1517 as internal control to have less assay-to-assay variability when compared to the assay described in Example 6 We anticipate to adopt this method for future release segment screening.

### Example 9: In Vitro Caspase 3/7 Assay of anti-EGFR X anti-CD3 Bispecific Antigen Binding Composition

[0268] Redirected cellular cytotoxicity of unmasked (with XTEN removed by proteolysis), masked (having 2 XTEN and 2 release segments cleavable by proteolysis), and uncleavable (with 2 XTEN and the release segments replaced by a peptide not susceptible to proteolysis) anti-EGFR x anti-CD3 bispecific antigen binding polypeptide compositions was assessed in an in vitro cell-based assay of caspase 3/7 activities of apoptotic cells. Similar to the caspase cytotoxicity assay described in the Examples, above, PBMC were mixed with EGFR positive tumor target cells in a ratio of 10 effector cells to 1 target cell. All anti-EGFR x anti-CD3 bispecific antigen binding polypeptide compositions were tested using a 10-point, 5x serial dilution of dose concentrations. The unmasked anti-EGFR x anti-CD3 composition was evaluated at a final dose range of 0.000012 to 10 nM. The masked and uncleavable bispecific antigen binding polypeptide compositions were analyzed at a final dose range of 0.00064 to 250 nM. Appropriate EGFR positive human tumor target cell lines included FaDu (squamous cell carcinoma of the head and neck, SCCHN), SCC-9 (SCCHN), HCT-116 (colorectal bearing KRAS mutation), NCI-H1573 (colorectal bearing KRAS mutation), HT-29 (colorectal bearing BRAF mutation) and NCI-H1975 (EGFR T790M mutation). The cell lines were selected to represent colorectal and SCCHN tumors with wild type EGFR and T790M, KRAS and BRAF mutations.

[0269] Upon cell lysis, released caspase 3/7 in culture supernatants was measured by the amount of luminogenic caspase 3/7 substrate cleavage by caspase 3/7 to generate the “glow-type” luminescent signal (Promega Caspase-Glo 3/7 cat#G8091). The amount of luminescence is proportional to the amount of caspase activities.

[0270] Results: As shown in Table 20, when evaluated in EGFR KRAS mutant HCT-116 cell line, the EC₅₀ activity of the masked anti-EGFR x anti-CD3 bispecific antigen binding polypeptide was 3,408 pM. The EC₅₀ of the uncleavable variant activity was >100,000 pM and the unmasked EC₅₀ activity of the unmasked compositions was 0.8 pM.

[0271] When evaluated in EGFR BRAF mutant HT-29 cell line, the EC₅₀ activity of the masked anti-EGFR x anti-CD3 bispecific antigen binding polypeptide was 10,930 pM. The EC₅₀ activity of the uncleavable and unmasked compositions was >100,000 pM and 0.8 pM respectively.

[0272] The masked anti-EGFR x anti-CD3 bispecific antigen binding polypeptide was ~4,000 to 14,000-fold less active than the unmasked anti-EGFR x anti-CD3 bispecific antigen binding polypeptide in the two EGFR mutant cell lines tested. As expected, the activity of the uncleavable variant was the least active of the 3 versions evaluated, with an EC₅₀ of greater than 100,000 pM.

[0273] Conclusions: The results demonstrated that anti-EGFR x anti-CD3 bispecific antigen binding polypeptide are cytotoxically active against EGFR KRAS- and BRAF-mutant cell lines. Masked anti-EGFR x anti-CD3 bispecific antigen binding polypeptide bearing two XTEN offered strong blocking of cytotoxicity activity, with 4000- to 14,000-fold less cytotoxicity compared to the unmasked form.

TABLE 20

In vitro cytotoxicity activity of unmasked, masked/cleavable and uncleavable anti-EGFR × anti-CD3 variants in HT-29 and HCT-116 human cell lines

| ProTIA | EC50 (pM) | |
|---|---|---|
| | HCT-116 | HT-29 |
| Unmasked pJB0169 | 0.8 | 0.8 |
| Masked pJB0169 | 3408 | 10930 |
| Uncleavable pJB0169 | >100000 | >100000 |

### Example 10: Anti-tumor Properties of anti-EGFR × anti-CD3 Bispecific Antigen Binding Polypeptide Compositions in Early Treatment HT-29 In Vivo Model.

[0274] An in vivo efficacy experiment was performed to evaluate an EGFR-CD3 bispecific antigen binding polypeptide composition based on the pJB0169 construct in immunodeficient NOD/SCID mice, characterized by the deficiency of T and B cells and impaired natural killer cells. Mice were maintained in sterile, standardized environmental conditions and the experiment was performed in accordance with US Institutional Animal Care Association for Assessment and Use Committee (IACUC Accreditation of Laboratory Animal Care (AAALAC)) guidelines. The efficacy of protease-treated and protease-untreated anti-EGFR × anti-CD3 bispecific antigen binding polypeptide (e.g. pJB0169) was evaluated using the EGFR BRAF mutant human HT-29 adenocarcinoma xenograft model. Briefly, on day 0, 6 NOD/SCID mice were subcutaneously implanted in the right flank with 3 × 10⁶ HT-29 cells per mouse (Cohort 1). On the same day, cohort 2 to 7 each consisting of 6 NOD/SCID mice per group were subcutaneously injected in the right flank with a mixture of 6 × 10⁶ human PBMC and 3 × 10⁶ HT-29 cells per mouse. Four hours after HT-29 or HT-29/PBMC mixture inoculation, treatments were initiated. Cohort 1 and 2 were injected intravenously with vehicle (PBS+0.05% Tween 80), cohort 3 and 4 were injected with 0.05 mg/kg of the intact anti-EGFR × anti-CD3 bispecific construct and 0.5 mg/kg of the anti-EGFR × anti-CD3 bispecific construct treated with protease to remove the XTEN from the polypeptide, respectively, cohort 5 and 6 were injected with 0.143 mg/kg and 1.43 mg/kg intact anti-EGFR × anti-CD3 bispecific construct, and cohort 7 were injected with 50 mg/kg cetuximab as the positive control. Cohorts 1 to 6 further received seven additional doses administered daily from day 1 to day 7 (total 8 doses). Cohort 7 was dosed with cetuximab twice/week for 4 weeks for a total of 8 doses.

[0275] Tumors in the mice were measured twice per week for a projected 33 days with a caliper in two perpendicular dimensions and tumor volumes were calculated by applying the (width² × length) / 2 formula. Body weight, general appearance and clinical observations such as seizures, tremors, lethargy, hyper-reactivity, pilo-erection, labored/rapid breathing, coloration and ulceration of tumor and death were also closely monitored as a measure of treatment related toxicity. Percent tumor growth inhibition index (%TGI) was calculated for each of the treatment group by applying the formula: ((Mean tumor volume of Cohort 2 vehicle control - Mean tumor volume of test article treatment)/mean tumor volume of Cohort 2 vehicle control) × 100. Treatment results with a %TGI ≥60% is considered therapeutically active.

[0276] Results: At day 33, vehicle-treated cohort 1 mice bearing tumor cells only had an average tumor burden of 250±113 mm³. Cohort 2 mice treated with vehicle in the presence of human effector cells did not inhibit tumor progression, having an average tumor burden of 238±228 mm3, demonstrating that human effector cells alone, as such, could not elicit an anti-tumor effect. Treatment with the protease-treated anti-EGFR × anti-CD3 construct at 0.05 mg/kg and 0.5 mg/kg (cohort 3 and 4 respectively) in the presence of human effector cells exhibited clear tumor growth inhibition with a %TGI of 99% for both treatment groups. Importantly, treatment with anti-EGRF × anti-CD3 XPAT at 0.143 mg/kg and 1.43 mg/kg (cohort 5 and 6 respectively) in the presence of human effector cells also inhibited tumor growth in a dose-dependent manner with %TGI of 70% for the 0.143 mg/kg dose group and 96% in the 1.43 mg/kg cohort. The data suggest that at 0.143 mg/kg and 1.43 mg/kg dosages, sufficient amounts of the anti-EGRF × anti-CD3 constructs were effectively cleaved by proteases in the in vivo tumor environment into the more active, unXTENylated anti-EGFR × anti-CD3 bispecific antigen binding fragments to yield the observed efficacy. Significantly, cohort 7 treated with 50 mg/kg of cetuximab did not induce tumor regression, with a %TGI of -20%.

[0277] Conclusions: The results suggest that the anti-EGFR × anti-CD3 bispecific construct can be effectively cleaved in vivo into the active form and is efficacious in the EGFR BRAF mutant HT-29 tumor environment to inhibit tumor progression. In addition, the anti-EGFR × anti-CD3 bispecific construct was superior to the cetuximab control in anti-tumor activity under the conditions of the experiment. Of note, no significant body weight loss was observed in all test article treatment groups and vehicle control indicating that all treatments were well tolerated.

### Example 11: Cell Binding Assessed by Flow Cytometry

[0278] Bispecific binding of the anti-EGFR × anti-CD3 bispecific antigen binding composition is also evaluated by flow cytometry-based assays utilizing CD3 positive human Jurkat cells and EGFR positive human cells selected from HT-29, HCT-116, NCI-H1573, NCI-H1975, FaDu, and SCC-9 or a stable CHO cell line expressing EGFR. CD3⁺ and EGFR⁺ cells are incubated with a dose range of untreated anti-EGFR × anti-CD3 bispecific antigen binding composition (PJB0169, comprising 2 XTEN and 2 RS), protease-treated PJB0169, and anti-CD3 scFv and anti-EGFR scFv positive controls for 30 min at 4° C. in binding buffer containing HBSS with 2% BSA and 5 mM EDTA. After washing with binding buffer to remove unbound test material, cells are incubated with FITC-conjugated anti-His tag antibody (Abcam cat #ab1206) for 30 min at 4° C. Unbound FITC-conjugated antibody is removed by washing with binding buffer and cells resuspended in binding buffer for acquisition on a FACS Calibur flow cytometer (Becton Dickerson) or equivalent instrument. All flow cytometry data are analyzed with FlowJo software (FlowJo LLC) or equivalent.

[0279] While anti-EGFR scFv is not expected to bind to Jurkat cells, anti-CD3 scFv, untreated PJB0169 and protease-treated PJB0169 are all expected to bind to Jurkat cells as indicated by an increase in fluorescence intensity when compared to Jurkat cells incubated with FITC-conjugated anti-His tag antibody alone. Similarly, anti-EGFR scFv, protease-treated and untreated PJB0169 are all expected to bind to EGFR positive cells, while anti-CD3 scFv is not expected to bind to EGFR positive cells. It is expected that these data will reflect the bispecific binding ability of the anti-EGFR × anti-CD3 bispecific antigen binding composition to recognize both the CD3 and EGFR antigen expressed respectively on Jurkat and the panel of EGFR expressing human cell lines. Furthermore, due to the XTEN polymer providing some interference in surface binding, the untreated anti-EGFR × anti-CD3 bispecific antigen binding composition is expected to bind at a lower affinity than the protease-treated bispecific antigen binding composition for both the CD3 and EpCAM antigens.

### Example 12: Cell Lysis Assessed by Flow Cytometry

[0280] Cell lysis by the anti-EGFR × anti-CD3 bispecific antigen binding composition is evaluated by flow cytometry utilizing human PBMCs and an EGFR positive cell line. EGFR positive HCT-116 target cells (or target cells selected from HT-29, NCI-H1573, NCI-H1975, FaDu, and SCC-9 or a stable CHO cell line expressing EGFR) are labeled with the fluorescent membrane dye CellVue Maroon dye (Affymetrix/eBioscience, cat #88-0870-16) according to manufacturer’s instructions. Alternatively PKH26 (Sigma, cat #MINI26 and PKH26GL) can also be used. In brief, HCT-116 cells are washed twice with PBS followed by resuspension of 2 × 10⁶ cells in 0.1 mL Diluent C provided with the CellVue Maroon labeling kit. In a separate tube, 2 microL of CellVue Maroon dye is mixed with 0.5 mL diluent C, and then 0.1 mL added to the HCT-116 cell suspension. The cell suspension and CellVue Maroon dye are mixed and incubated for 2 min at room temperature. The labeling reaction is then quenched by the addition of 0.2 mL of fetal bovine serum (FCS). Labeled cells are washed twice with complete cell culture medium (RPMI-1640 containing 10% FCS) and the total number of viable cells determined by trypan blue exclusion. For an effector to target ratio of 10:1 in a total volume of 200 microL per well, 1×10⁵ PBMC are co-cultured with 1 × 10⁴ CellVue Maroon-labeled HCT-116 cells per well in a 96-well round-bottom plate in the absence or presence of the indicated dose range concentration of protease-treated and untreated anti-EGFR × anti-CD3 bispecific antigen binding composition (PJB0169, comprising 2 XTEN and 2 RS) samples. After 24 h, cells are harvested with Accutase (Innovative Cell Technologies, cat #AT104) and washed with 2% FCS/PBS. Before cell acquisition on a Guava easyCyte flow cytometer (Millipore), cells are resuspended in 100 microL 2% FCS/PBS supplemented with 2.5 micrograms/mL 7-AAD (Affymetrix/eBioscience, cat #00-6993-50) to discriminate between alive (7-AAD-negative) and dead (7-AAD-positive) cells. FACS data are analyzed with guavaSoft software (Millipore); and percentage of dead target cells is calculated by the number of 7-AAD-positive/CellVue Maroon-positive cells divided by the total number of CellVue Maroon-positive cells.

[0281] Dose response kill curves of percent cytotoxicity against bispecific antigen binding composition concentration are analyzed by 4 parameter-logistic regression equation using GraphPad Prism; and the concentration of bispecific antigen binding composition that induced half maximal percent cell cytotoxicity is thus determined.

[0282] Cytotoxicity results utilizing flow cytometry are expected to be in-line with results obtained with other cytotoxicity assays, including LDH and caspase. Exposure of HCT-116 cells to protease-cleaved and uncleaved anti-EGFR × anti-CD3 bispecific antigen binding compositions in the absence of PBMC are expected to have no effect. Similarly, PBMC are not expected to be activated in the presence of bispecific antigen binding composition without target cells. These results are expected to indicate that bispecific antigen binding compositions need to be clustered on the surface of target cells in order to stimulate PBMC for cytotoxicity activity. In the presence of PBMC and target cells, there would be a concentration-dependent cytotoxic effect due to bispecific antigen binding composition pretreated or untreated with protease. Further, results are expected to show that exposure of HCT-116 cells to untreated bispecific antigen binding composition (no protease) in the presence of PBMC would show reduced cytotoxicity as compared to protease-cleaved bispecific antigen binding composition.

### Example 13: T-cell Activation Marker Assays of anti-EGFR × anti-CD3 Bispecific Antigen Binding Composition.

[0283] To measure the anti-EGFR × anti-CD3 bispecific antigen binding composition induced activation markers (CD69 and CD25), 1 × 10⁵ PBMC or purified CD3+ cells are co-cultured in RPMI-1640 containing 10% FCS with 1 × 10⁴ HCT-116 or HT-29 cells per assay well (i.e., effector to target ratio of 10:1) in the presence of anti-EGFR × anti-CD3 bispecific antigen binding composition (PJB0169, comprising 2 XTEN and 2 RS) in a 96-well round-bottom plate with total final volume of 200 microL. After 20 h incubation in a 37° C., 5% CO₂ humidified incubator, cells are stained with PECy5-conjugated anti-CD4, APC-conjugated anti-CD8, PE-conjugated anti-CD25, and FITC-conjugated anti-CD69 (all antibodies from BioLegend) in FACS buffer (1% BSA/PBS) at 4° C., washed twice with FACS buffer, and then re-suspended in FACS buffer for acquisition on a Guava easyCyte flow cytometer (Millipore).

[0284] The T-cell activation marker expression trend of the three bispecific antigen binding composition molecules is expected to be similar to that observed by cytotoxicity assays, including LDH and caspase. Activation of CD69 on CD8 and CD4 populations of PBMC or CD3+ cells by untreated anti-EGFR × anti-CD3 bispecific antigen binding composition (pJB0169) is expected to be less active than protease-treated pJB0169 bispecific antigen binding composition; and the non-cleavable anti-EGFR × anti-CD3 bispecific antigen binding composition (pJB0172) is expected to be less active than the untreated pJB0169.

### Example 14: Cytometric Bead Array Analysis for Human Th1/Th2 Cytokines Using Stimulated Normal Healthy Human PBMCs and Intact and Protease-treated anti-EGFR × anti-CD3 Bispecific Antigen Binding Composition

[0285] As a safety assessment of the ability of intact versus cleaved anti-EGFR × anti-CD3 bispecific antigen binding composition (pJB0169, comprising 2 XTEN and 2 RS) to stimulate release of T-cell related cytokines in a cell-based in vitro assay, a panel of cytokines including IL-2, IL-4, IL-6, IL-10, TNF-alpha, IFN-gamma are analyzed using the cytometric bead array (CBA) on supernatants from cultured human PBMC stimulated with protease-treated and untreated anti-EGFR × anti-CD3 bispecific antigen binding composition samples. The antihuman CD3 antibody, OKT3, is used as positive control and untreated wells serve as negative control.

[0286] Briefly, OKT3 (0, 10 nM, 100 nM and 1000 nM) and protease-treated and untreated anti-EGFR × anti-CD3 bispecific antigen binding composition (pJB0169 at 10 nM, 100 nM, 1000 nM and 2000 nM) are dry-coated onto a 96-well flat bottomed plate by allowing the wells to evaporate overnight in the biosafety hood. Wells are then washed once gently with PBS and 1X10⁶ PBMC in 200 microL were added to each well. The plate is then incubated at 37° C., 5% CO₂ for 24 h, after which tissue culture supernatant is collected from each well and analyzed for cytokine released using the validated commercial CBA kit (BD CBA human Th1/Th2 cytokine kit, cat # 551809) by flow cytometry following manufacturer’s instructions.

[0287] OKT3, but not untreated wells, is expected to induce robust secretion of all cytokines (IL-2, IL-4, IL-6, IL-10, TNF-alpha, IFN-gamma) evaluated, thereby confirming the performance of the CBA cytokine assay. Stimulation with protease-treated anti-EGFR × anti-CD3 bispecific antigen binding composition is expected to trigger significant cytokine expression, especially at concentrations higher than 100 nM for all of the cytokines tested. In contrast, baseline levels of IL-2, IL-6, IL-10, TNF-alpha and IFN-gamma are expected when the intact non-cleaved anti-EGFR × anti-CD3 bispecific antigen binding composition molecule is the stimulant at a concentration range of 10 to 2000 nM. These data support that the XTEN polymer of the intact bispecific antigen binding composition provides considerable shielding effect and hinders PBMC stimulated cytokine responses compared to the protease-treated bispecific antigen binding composition in which the EGFR × anti-CD3 portion is released from the composition.

### Example 15: Cytotoxicity Assays of anti-EGFR × anti-CD3 Bispecific Antigen Binding Composition in the Presence of Purified CD3 Positive T cells.

[0288] To demonstrate that cytotoxic activity of bispecific antigen binding composition molecules is mediated by CD3 positive T cells, non-cleavable anti-EGFR × anti-CD3 bispecific antigen binding composition without the release segment (pJB0172, comprising 2 XTEN) and protease-treated and untreated anti-EGFR × anti-CD3 bispecific antigen binding composition (pJB0169, comprising 2 XTEN and 2 RS) are evaluated in EGFR+ human cell lines (e.g. HCT-116 or HT-29) in the presence of purified human CD3 positive T cells. Purified human CD3 positive T cells are purchased from BioreclamationIV, where they are isolated by negative selection using MagCellect Human CD3+ T cell isolation kit from whole blood of healthy donors. In this experiment, purified human CD3 positive T cells are mixed with an EGFR+ cell line in a ratio of about 10:1 and all three bispecific antigen binding composition molecules were tested as a 12-point, 5x serial dilution dose curve in the LDH assay as described above. The activity trend of the three bispecific antigen binding composition molecules profiled with CD3+ cells is expected to be similar to the profile of the same cell line with PBMCs. Untreated pJB0169 is expected to be less active than protease-treated pJB0169; and the non-cleavable pJB0172 is expected to be less active than untreated pJB0169. Such results would demonstrate that cytotoxic activity of bispecific antigen binding composition molecules is indeed mediated by CD3 positive T cells. The susceptibility of the release segment contained within the cleavable anti-EGFR × anti-CD3 bispecific antigen binding composition molecule to proteases postulated to be released from the tumor cells and/or activated CD3 positive T cells in the assay mixture is likely to differ between cell lines.

### Example 16: T-cell Activation Marker and Cytokine Release Assays of anti-EGFR × anti-CD3 Bispecific Antigen Binding Composition.

[0289] To measure the anti-EGFR × anti-CD3 bispecific antigen binding composition induced expression of cytokines, purified CD3+ cells are co-cultured with HCT-116 cells per assay well (i.e., effector to target ratio of about 10:1) in the presence of anti-EGFR × anti-CD3 bispecific antigen binding composition (pJB0169, comprising 2 XTEN and 2 RS) in a 96-well round-bottom plate with total final volume of 200 microL. After 20 h incubation in a 37° C., 5% CO₂ humidified incubator, cell supernatant is harvested for cytokine measurements. This assay can also be performed with other target cells selected from HT-29, NCI-H1573, NCI-H1975, FaDu, and SCC-9 as well as PBMC in place of purified CD3+ cells.

[0290] Cytokine analysis of interleukin (IL)-2, IL-4, IL-6, IL-10, tumor necrosis factor (TNF)-alpha and interferon (IFN)-gamma secreted into the cell culture supernatant is quantitated using the Human Th1/Th2 Cytokine Cytometric Bead Array (CBA) kit (BD Biosciences cat #550749) following manufacturer’s instruction. In the absence of bispecific antigen binding composition, no cytokine secretion above background is expected from purified CD3+ cells. pJB0169 in the presence of EGFR-positive target cells and purified CD3+ cells is expected to activate T cells and secrete a pattern of T cell cytokines with a high proportion of Th1 cytokines such as IFN-gamma and TNF-alpha. Compared to intact pJB0169, lower concentrations of protease-treated pJB0169 are expected to active T cells and secrete T cell cytokines, supporting the shielding effect of the XTEN polymer in the bispecific antigen binding composition.

### Example 17: Single- and Multi-dose Pharmacokinetic Determination of anti-EGFR × anti-CD3 Bispecific Antigen Binding Polypeptide in Non-Human Primates

[0291] The pharmacokinetics (PK) and general tolerability of anti-EGFR × anti-CD3 bispecific antigen binding polypeptide bearing 2 XTEN polymers (i.e., pJB0169) following single and multiple intravenous administrations was evaluated in naïve, healthy non-human primates (NHP) (e.g., cynomolgus monkeys). Briefly, one female and one male monkey was intravenously infused with 8.5 µg/kg of the composition via the cephalic vein. Both animals were monitored for two weeks. Following no observable adverse events, animals were subjected to a multi-dose regimen initiated as one dose every three days for three weeks (total 9 doses in study). The multi-dose phase began with Day 15 and ended on Day 36. At specific time points throughout the study, blood was collected for assay of pharmacokinetics, cytokines, hematology and serum chemistries.

[0292] Animal monitoring included body weight, body temperature and cage-side observations once or twice daily during the duration of the study. Animals were monitored for general health and appearance; signs of pain and distress, fever, chills, nauseas, vomiting and skin integrity. On dosing days, animals were checked for injection site reactions before and after administration of the compositions. Hematology and serum chemistry were determined at predose and 24 hour after first single dose. Cytokines were evaluated at pre-dose and at appropriate intervals within 72 hours post first single dose and in the multi-dose phase.

[0293] The amount of pJB0169 present in plasma was quantitated on a sandwich ELISA using EGFR-biotin captured on an electrochemiluminescence streptavidin plate with sulfo-tagged anti-XTEN-antibody as detection. Pharmacokinetic parameters including Cmax, Tmax, area under the curve, half-life and exposure profile were analyzed using the WinNonLin software.

[0294] The cytokine panel included measurement of IFN-gamma, IL-1beta, TNF-alpha, IL-1beta, IL-2, IL-4, IL-6, and IL-10 using the Meso-Scale Discovery platform following manufacturer’s instructions. The lower limit of detection for these cytokines are 2.0 pg/mL, 0.32 pg/mL, 0.11 pg/mL, 0.68 pg/mL, 0.04 pg/mL, 0.23 pg/mL and 0.10 pg/mL respectively. The hematology panel included measurement of white blood cells, red blood cells, hemoglobin, hematocrit, mean corpuscular hemoglobin volume, mean corpuscular hemoglobin concentration, red blood cell distribution width, platelet, mean platelet volume, % neutrophils, % lymphocytes, % monocytes, % eosinophils and % basophils.The serum chemistry panel included measurement of alanine aminotransferase, aspartate aminotransferase, total protein, albumin, alkaline phosphatase, globulin, albumin/globulin ratio, γ-glutamyltransferase, glucose, urea, creatinine, calcium, total cholesterol, triglycerides, total bilirubin, sodium, potassium, chlorine and creatine kinase.

[0295] Results: pJB0169 was well tolerated at a dose of 8.5 µg/kg. There was no loss in body weight. No chills, fever, nausea, vomiting, skin rash, test artile injection site reaction were observed. All measured cytokine levels except IL-6 were below the limits of detection. Although detectable in the single-dose and multi-dose phase, the level of IL-6 detected is considered to be background with the highest level not exceeding 51 pg/mL in male and 19 pg/mL in female animals in the range of time points evaluated. Hematology and clinical panel were within normal range. Following Day 1 administration, at 8.5 µg/kg, the average Cₘₐₓ value was 372 ng/mL, the averaged AUC₀₋₁₆₈ₕ was 15839 ng*h/mL, the averaged AUC_{0-inf} was 16342 ng*h/mL, the averaged CL value was 0.00886 mL/min/kg and the averaged T_{½} value was 24.2 hours. The volume of distribution (Vd) was 0.0238 L/kg. Following Day 36 administration, average Cₘₐₓ value was 410 ng/mL, the averaged AUC₀₋₁₆₈ₕ was 22985 ng*h/mL, the averaged AUC₀₋inf was 24663 ng*h/mL, the averaged CL value was 0.00578 mL/min/kg and the averaged T_{½} value was 44.0 hours. The volume of distribution (Vd) was 0.0196 L/kg. The accumulative index of Cₘₐₓ and AUC₀₋₁₆₈ₕ in monkey following single or multiple IV infusion administration of pJB0169 at 8.5 µg/kg were 1.10 and 1.45. There was no significant difference in systemic exposure between Day 1 and Day 36 administration. Data also suggest no emergence of anti-drug antibodies.

### Example 18: Dose Range Finding of anti-EGFR × anti-CD3 Bispecific Antigen Binding Polypeptide in Non-Human Primates

[0296] The dose range finding study of pJB0169 bispecific antigen binding polypeptide in non-human primates was carried out in healthy, naïve cynomolgus monkeys with one female and one male monkey per cohort. Briefly, one female and one male monkey was intravenously infused with pJB0169 via the cephalic vein. Both animals were monitored for two weeks. Following no observable adverse events, animals were subjected to a multi-dose regimen initiated as one dose every three days for three weeks (total 9 doses in study). The multi-dosing phase began with Day 15 and ended on Day 36. At specific time points throughout the study, blood was collected for assay of pharmacokinetics, cytokines, hematology and serum chemistries. Twenty-four hours after the last dose (i.e., Day 37), animals were necropsied for histopathology evaluation. When no adverse events were observed one week after the first dose in a cohort, pJB0169 was dose escalated 2- or 3-fold in the next cohort. Dose escalation will proceed until adverse events are observed.

[0297] Animal monitoring included body weight, food consumption, body temperature and cage-side observations once or twice daily during the duration of the study. Animals were monitored for general health and appearance; signs of pain and distress; fever, chills, nauseas, vomiting and skin integrity. On dosing days, animals were checked for injection site reaction before and after XPAT administration.

[0298] The amount of pJB0169 present in plasma will be quantitated on a sandwich ELISA using EGFR-biotin captured on an electrochemiluminescence streptavidin plate with sulfo-tagged anti-XTEN-antibody as detection. Pharmacokinetic parameters including Cmax, Tmax, area under the curve, half-life and exposure profile will be analyzed using WinNonLin software.

[0299] The cytokine panel includes measurement of IL-2, IL-4, IL-5, IL-6, IL-10, IL-13, IFN-γ and TNFα using Beckon Dickinson Cytometric Bead Array.

[0300] The hematology panel included measurement of white blood cells, red blood cells, hemoglobin, hematocrit, mean corpuscular hemoglobin volume, mean corpuscular hemoglobin concentration, red blood cell distribution width, platelet, mean platelet volume, % neutrophils, % lymphocytes, % monocytes, % eosinophils and % basophils.

[0301] The serum chemistry panel included measurement of alanine aminotransferase, aspartate aminotransferase, total protein, albumin, alkaline phosphatase, globulin, albumin/globulin ratio, γ-glutamyltransferase, glucose, urea, creatinine, calcium, total cholesterol, triglycerides, total bilirubin, sodium, potassium, chlorine and creatine kinase.

[0302] Histopathology evaluation with H&E staining were performed on a panel of tissues including adrenal glands, aorta, bone, brain, epididymides, esophagus, eyes, fallopian tubes (female only), heart, kidney, large intestines, liver with gall bladder, lungs, lymph nodes, mammary glands (female only), ovaries (female only), pancreas, pituitary gland, prostate gland, salivary glands, skeletal muscles, skin, small intestines, spinal cord, spleen, stomach, testes (male only), thymus, thyroid glands, trachea, urinary bladder, uterus and injection site.

[0303] Interim results: The starting dose in this dose range finding study was Cohort 1 at 25.5 µg/kg of pJB0169. No observable adverse events such as fever, chills, skin rash, nausea, vomiting, abnormal hematology and serum chemistry were observed in the single-dose and multi-dose phase. pJB0169 was therefore dose-escalated 3-fold to 76.5 µg/kg in Cohort 2. No observable adverse events were observed in Cohort 2 and pJB0169 was dose-escalated 3-fold to 230 µg/kg in Cohort 3. Other than a reversible increase in AST, ALT and total bilirubin readings above the normal range, no other adverse events were observed and pJB0169 was next dose-escalated 2-fold to 460 µg/kg in Cohort 4. No observable adverse events were observed in Cohort 4. Further dose escalation of pJB0169 is ongoing.

[0304] There were no found dead and moribund animals during the whole study period. There were no test article-related organ weight changes in any treatment groups. There were no observed gross lesions in all the tested animals. Microscopically, the major findings were subcutaneous hemorrhage, tissue necrosis, neutrophilic infiltration, venous necrosis or thrombosis, and skin crust at the injection sites of some animals. These changes were likely attributed to the intravenous infusion procedure.

[0305] Interim conclusions: pJB0169 is well tolerated in non-human primates at doses up to 460 µg/kg. No test article-related organ weight and pathologic changes were observed in all tested dose groups.

### Example 19: Determination of Isoelectric Point (pI) of Antigen Binding Fragments

[0306] To determine the isoelectric point of each CD3 and EGFR variant antigen binding fragment, each was analyzed using the Protein Titration Curve Panel in the Biologics suite of Maestro (Schrödinger, Germany). The titration curve for a protein is calculated from the pKa values of titratable groups—individual ionizable residues and termini- by summing the fractional charges of each such group at intervals in the pH value. The pKa values are generated with ProPKA (Sondergaard, C. et al. Toxicol Lett. 205(2):116 (2011); Olsson, M. et. al. Proteins 79:3333 (2011)). The titration curves were plotted and the isoelectric point (pI) was determined for each curve, with the results presented in the tables, below.

TABLE 21

Isoelectric points for CD3 variants

| Antibody | Variant | Isoelectric Point (pI) |
|---|---|---|
| CD3 | 3.9 | 6.8 |
| CD3 | CD3.30 | 6.8 |
| CD3 | CD3.31 | 6.2 |
| CD3 | CD3.32 | 6.2 |
| CD3 | CD3.33 | 6.2 |

TABLE 22

Isoelectric points for EGFR variants

| Antibody | Variant | Isoelectric Point (pI) |
|---|---|---|
| EGFR | EGFR.2 | 5.0 |
| EGFR | EGFR.13 | 5.0 |
| EGFR | EGFR.18 | 5.1 |
| EGFR | EGFR.23 | 5.1 |
| EGFR | EGFR.14 | 5.0 |
| EGFR | EGFR.19 | 5.1 |
| EGFR | EGFR.24 | 5.1 |
| EGFR | EGFR.15 | 5.3 |
| EGFR | EGFR.20 | 5.5 |
| EGFR | EGFR.25 | 5.5 |
| EGFR | EGFR.16 | 5.3 |
| EGFR | EGFR.21 | 5.5 |
| EGFR | EGFR.26 | 5.5 |
| EGFR | EGFR.17 | 5.3 |
| EGFR | EGFR.22 | 5.5 |
| EGFR | EGFR.27 | 5.5 |

The application's sequence listing, which the Patent Office published only in electronic form, follows.

SEQUENCE LISTING (948 sequences)

SEQ ID NO: 1 - protein, 11 aa, Artificial Sequence
  Description of Artificial Sequence: Synthetic peptide
QASQDISNYLN

SEQ ID NO: 2 - protein, 7 aa, Artificial Sequence
  Description of Artificial Sequence: Synthetic peptide
DASNLET

SEQ ID NO: 3 - protein, 9 aa, Artificial Sequence
  Description of Artificial Sequence: Synthetic peptide
QHFDHLPLA

SEQ ID NO: 4 - protein, 10 aa, Artificial Sequence
  Description of Artificial Sequence: Synthetic peptide
GGSVSSGDYY

SEQ ID NO: 5 - protein, 16 aa, Artificial Sequence
  Description of Artificial Sequence: Synthetic peptide
HIYYSGNTNYNPSLKS

SEQ ID NO: 6 - protein, 11 aa, Artificial Sequence
  Description of Artificial Sequence: Synthetic peptide
VRDRVTGAFDI

SEQ ID NO: 7 - protein, 23 aa, Artificial Sequence
  Description of Artificial Sequence: Synthetic peptide
DIQMTQSPSSLSASVGDRVTITC

SEQ ID NO: 8 - protein, 15 aa, Artificial Sequence
  Description of Artificial Sequence: Synthetic peptide
WYQQKPGKAPKLLIY

SEQ ID NO: 9 - protein, 32 aa, Artificial Sequence
  Description of Artificial Sequence: Synthetic polypeptide
GVPSRFSGSGSGTDFTFTISSLQPEDTATYFC

SEQ ID NO: 10 - protein, 32 aa, Artificial Sequence
  Description of Artificial Sequence: Synthetic polypeptide
GVPSRFSGSGSGTDFTFTISRLQPEDIATYFC

SEQ ID NO: 11 - protein, 32 aa, Artificial Sequence
  Description of Artificial Sequence: Synthetic polypeptide
GVPSRFSGSGSGTDFTFTISRLQPEDTATYFC

SEQ ID NO: 12 - protein, 32 aa, Artificial Sequence
  Description of Artificial Sequence: Synthetic polypeptide
GVPSRFSGSGSGTDFTFTISSLQPEDIATYFC

SEQ ID NO: 13 - protein, 10 aa, Artificial Sequence
  Description of Artificial Sequence: Synthetic peptide
FGGGTKVEIK

SEQ ID NO: 14 - protein, 25 aa, Artificial Sequence
  Description of Artificial Sequence: Synthetic peptide
QVQLQESGPGAVKPSETLSLTCTVS

SEQ ID NO: 15 - protein, 25 aa, Artificial Sequence
  Description of Artificial Sequence: Synthetic peptide
QVQLQESGPGLVKPSQTLSLTCTVS

SEQ ID NO: 16 - protein, 25 aa, Artificial Sequence
  Description of Artificial Sequence: Synthetic peptide
QVQLQESGPGAVKPSQTLSLTCTVS

SEQ ID NO: 17 - protein, 25 aa, Artificial Sequence
  Description of Artificial Sequence: Synthetic peptide
QVQLQESGPGLVKPSETLSLTCTVS

SEQ ID NO: 18 - protein, 16 aa, Artificial Sequence
  Description of Artificial Sequence: Synthetic peptide
WTWIRQSPGKGLEWIG

SEQ ID NO: 19 - protein, 16 aa, Artificial Sequence
  Description of Artificial Sequence: Synthetic peptide
WTWIRQRPGKGLEWIG

SEQ ID NO: 20 - protein, 30 aa, Artificial Sequence
  Description of Artificial Sequence: Synthetic polypeptide
RLTISIDTSKTQFSLKLSSVTAADTATYYC

SEQ ID NO: 21 - protein, 30 aa, Artificial Sequence
  Description of Artificial Sequence: Synthetic polypeptide
RLTISIDTSKTQFSLKLSSVTAADTAIYYC

SEQ ID NO: 22 - protein, 11 aa, Artificial Sequence
  Description of Artificial Sequence: Synthetic peptide
WGQGTAVTVSS

SEQ ID NO: 23 - protein, 11 aa, Artificial Sequence
  Description of Artificial Sequence: Synthetic peptide
WGQGTTVTVSS

SEQ ID NO: 24 - protein, 11 aa, Artificial Sequence
  Description of Artificial Sequence: Synthetic peptide
WGQGTMVTVSS

SEQ ID NO: 25 - protein, 107 aa, Artificial Sequence
  Description of Artificial Sequence: Synthetic polypeptide
DIQMTQSPSSLSASVGDRVTITCQASQDISNYLNWYQQKPGKAPKLLIYDASNLETGVPSRFSGSGSGTDFTFTISSLQPEDTATYFCQHFDHLPLAFGGGTKVEIK

SEQ ID NO: 26 - protein, 107 aa, Artificial Sequence
  Description of Artificial Sequence: Synthetic polypeptide
DIQMTQSPSSLSASVGDRVTITCQASQDISNYLNWYQQKPGKAPKLLIYDASNLETGVPSRFSGSGSGTDFTFTISRLQPEDIATYFCQHFDHLPLAFGGGTKVEIK

SEQ ID NO: 27 - protein, 107 aa, Artificial Sequence
  Description of Artificial Sequence: Synthetic polypeptide
DIQMTQSPSSLSASVGDRVTITCQASQDISNYLNWYQQKPGKAPKLLIYDASNLETGVPSRFSGSGSGTDFTFTISRLQPEDTATYFCQHFDHLPLAFGGGTKVEIK

SEQ ID NO: 28 - protein, 119 aa, Artificial Sequence
  Description of Artificial Sequence: Synthetic polypeptide
QVQLQESGPGAVKPSETLSLTCTVSGGSVSSGDYYWTWIRQSPGKGLEWIGHIYYSGNTNYNPSLKSRLTISIDTSKTQFSLKLSSVTAADTATYYCVRDRVTGAFDIWGQGTAVTVSS

SEQ ID NO: 29 - protein, 119 aa, Artificial Sequence
  Description of Artificial Sequence: Synthetic polypeptide
QVQLQESGPGAVKPSETLSLTCTVSGGSVSSGDYYWTWIRQSPGKGLEWIGHIYYSGNTNYNPSLKSRLTISIDTSKTQFSLKLSSVTAADTATYYCVRDRVTGAFDIWGQGTTVTVSS

SEQ ID NO: 30 - protein, 119 aa, Artificial Sequence
  Description of Artificial Sequence: Synthetic polypeptide
QVQLQESGPGLVKPSQTLSLTCTVSGGSVSSGDYYWTWIRQRPGKGLEWIGHIYYSGNTNYNPSLKSRLTISIDTSKTQFSLKLSSVTAADTAIYYCVRDRVTGAFDIWGQGTMVTVSS

SEQ ID NO: 31 - protein, 119 aa, Artificial Sequence
  Description of Artificial Sequence: Synthetic polypeptide
QVQLQESGPGAVKPSQTLSLTCTVSGGSVSSGDYYWTWIRQRPGKGLEWIGHIYYSGNTNYNPSLKSRLTISIDTSKTQFSLKLSSVTAADTATYYCVRDRVTGAFDIWGQGTAVTVSS

SEQ ID NO: 32 - protein, 119 aa, Artificial Sequence
  Description of Artificial Sequence: Synthetic polypeptide
QVQLQESGPGAVKPSQTLSLTCTVSGGSVSSGDYYWTWIRQRPGKGLEWIGHIYYSGNTNYNPSLKSRLTISIDTSKTQFSLKLSSVTAADTATYYCVRDRVTGAFDIWGQGTTVTVSS

SEQ ID NO: 33-34 - skipped (2 entries)

SEQ ID NO: 35 - protein, 107 aa, Artificial Sequence [sequence omitted]

SEQ ID NO: 36 - protein, 119 aa, Artificial Sequence [sequence omitted]

SEQ ID NO: 37 - protein, 256 aa, Artificial Sequence
  Description of Artificial Sequence: Synthetic polypeptide
DIQMTQSPSSLSASVGDRVTITCQASQDISNYLNWYQQKPGKAPKLLIYDASNLETGVPSRFSGSGSGTDFTFTISSLQPEDTATYFCQHFDHLPLAFGGGTKVEIKGATPPETGAETESPGETTGGSAESEPPGEGQVQLQESGPGAVKPSETLSLTCTVSGGSVSSGDYYWTWIRQSPGKGLEWIGHIYYSGNTNYNPSLKSRLTISIDTSKTQFSLKLSSVTAADTATYYCVRDRVTGAFDIWGQGTAVTVSS

SEQ ID NO: 38 - protein, 256 aa, Artificial Sequence
  Description of Artificial Sequence: Synthetic polypeptide
DIQMTQSPSSLSASVGDRVTITCQASQDISNYLNWYQQKPGKAPKLLIYDASNLETGVPSRFSGSGSGTDFTFTISSLQPEDTATYFCQHFDHLPLAFGGGTKVEIKGATPPETGAETESPGETTGGSAESEPPGEGQVQLQESGPGAVKPSETLSLTCTVSGGSVSSGDYYWTWIRQSPGKGLEWIGHIYYSGNTNYNPSLKSRLTISIDTSKTQFSLKLSSVTAADTATYYCVRDRVTGAFDIWGQGTTVTVSS

SEQ ID NO: 39 - protein, 256 aa, Artificial Sequence
  Description of Artificial Sequence: Synthetic polypeptide
DIQMTQSPSSLSASVGDRVTITCQASQDISNYLNWYQQKPGKAPKLLIYDASNLETGVPSRFSGSGSGTDFTFTISSLQPEDTATYFCQHFDHLPLAFGGGTKVEIKGATPPETGAETESPGETTGGSAESEPPGEGQVQLQESGPGLVKPSQTLSLTCTVSGGSVSSGDYYWTWIRQRPGKGLEWIGHIYYSGNTNYNPSLKSRLTISIDTSKTQFSLKLSSVTAADTAIYYCVRDRVTGAFDIWGQGTMVTVSS

SEQ ID NO: 40 - protein, 256 aa, Artificial Sequence
  Description of Artificial Sequence: Synthetic polypeptide
DIQMTQSPSSLSASVGDRVTITCQASQDISNYLNWYQQKPGKAPKLLIYDASNLETGVPSRFSGSGSGTDFTFTISSLQPEDTATYFCQHFDHLPLAFGGGTKVEIKGATPPETGAETESPGETTGGSAESEPPGEGQVQLQESGPGAVKPSQTLSLTCTVSGGSVSSGDYYWTWIRQRPGKGLEWIGHIYYSGNTNYNPSLKSRLTISIDTSKTQFSLKLSSVTAADTATYYCVRDRVTGAFDIWGQGTAVTVSS

SEQ ID NO: 41 - protein, 256 aa, Artificial Sequence
  Description of Artificial Sequence: Synthetic polypeptide
DIQMTQSPSSLSASVGDRVTITCQASQDISNYLNWYQQKPGKAPKLLIYDASNLETGVPSRFSGSGSGTDFTFTISSLQPEDTATYFCQHFDHLPLAFGGGTKVEIKGATPPETGAETESPGETTGGSAESEPPGEGQVQLQESGPGAVKPSQTLSLTCTVSGGSVSSGDYYWTWIRQRPGKGLEWIGHIYYSGNTNYNPSLKSRLTISIDTSKTQFSLKLSSVTAADTATYYCVRDRVTGAFDIWGQGTTVTVSS

SEQ ID NO: 42 - protein, 256 aa, Artificial Sequence
  Description of Artificial Sequence: Synthetic polypeptide
DIQMTQSPSSLSASVGDRVTITCQASQDISNYLNWYQQKPGKAPKLLIYDASNLETGVPSRFSGSGSGTDFTFTISRLQPEDIATYFCQHFDHLPLAFGGGTKVEIKGATPPETGAETESPGETTGGSAESEPPGEGQVQLQESGPGAVKPSETLSLTCTVSGGSVSSGDYYWTWIRQSPGKGLEWIGHIYYSGNTNYNPSLKSRLTISIDTSKTQFSLKLSSVTAADTATYYCVRDRVTGAFDIWGQGTAVTVSS

SEQ ID NO: 43 - protein, 256 aa, Artificial Sequence
  Description of Artificial Sequence: Synthetic polypeptide
DIQMTQSPSSLSASVGDRVTITCQASQDISNYLNWYQQKPGKAPKLLIYDASNLETGVPSRFSGSGSGTDFTFTISRLQPEDIATYFCQHFDHLPLAFGGGTKVEIKGATPPETGAETESPGETTGGSAESEPPGEGQVQLQESGPGAVKPSETLSLTCTVSGGSVSSGDYYWTWIRQSPGKGLEWIGHIYYSGNTNYNPSLKSRLTISIDTSKTQFSLKLSSVTAADTATYYCVRDRVTGAFDIWGQGTTVTVSS

SEQ ID NO: 44 - protein, 256 aa, Artificial Sequence
  Description of Artificial Sequence: Synthetic polypeptide
DIQMTQSPSSLSASVGDRVTITCQASQDISNYLNWYQQKPGKAPKLLIYDASNLETGVPSRFSGSGSGTDFTFTISRLQPEDIATYFCQHFDHLPLAFGGGTKVEIKGATPPETGAETESPGETTGGSAESEPPGEGQVQLQESGPGLVKPSQTLSLTCTVSGGSVSSGDYYWTWIRQRPGKGLEWIGHIYYSGNTNYNPSLKSRLTISIDTSKTQFSLKLSSVTAADTAIYYCVRDRVTGAFDIWGQGTMVTVSS

SEQ ID NO: 45 - protein, 256 aa, Artificial Sequence
  Description of Artificial Sequence: Synthetic polypeptide
DIQMTQSPSSLSASVGDRVTITCQASQDISNYLNWYQQKPGKAPKLLIYDASNLETGVPSRFSGSGSGTDFTFTISRLQPEDIATYFCQHFDHLPLAFGGGTKVEIKGATPPETGAETESPGETTGGSAESEPPGEGQVQLQESGPGAVKPSQTLSLTCTVSGGSVSSGDYYWTWIRQRPGKGLEWIGHIYYSGNTNYNPSLKSRLTISIDTSKTQFSLKLSSVTAADTATYYCVRDRVTGAFDIWGQGTAVTVSS

SEQ ID NO: 46 - protein, 256 aa, Artificial Sequence
  Description of Artificial Sequence: Synthetic polypeptide
DIQMTQSPSSLSASVGDRVTITCQASQDISNYLNWYQQKPGKAPKLLIYDASNLETGVPSRFSGSGSGTDFTFTISRLQPEDIATYFCQHFDHLPLAFGGGTKVEIKGATPPETGAETESPGETTGGSAESEPPGEGQVQLQESGPGAVKPSQTLSLTCTVSGGSVSSGDYYWTWIRQRPGKGLEWIGHIYYSGNTNYNPSLKSRLTISIDTSKTQFSLKLSSVTAADTATYYCVRDRVTGAFDIWGQGTTVTVSS

SEQ ID NO: 47 - protein, 256 aa, Artificial Sequence
  Description of Artificial Sequence: Synthetic polypeptide
DIQMTQSPSSLSASVGDRVTITCQASQDISNYLNWYQQKPGKAPKLLIYDASNLETGVPSRFSGSGSGTDFTFTISRLQPEDTATYFCQHFDHLPLAFGGGTKVEIKGATPPETGAETESPGETTGGSAESEPPGEGQVQLQESGPGAVKPSETLSLTCTVSGGSVSSGDYYWTWIRQSPGKGLEWIGHIYYSGNTNYNPSLKSRLTISIDTSKTQFSLKLSSVTAADTATYYCVRDRVTGAFDIWGQGTAVTVSS

SEQ ID NO: 48 - protein, 256 aa, Artificial Sequence
  Description of Artificial Sequence: Synthetic polypeptide
DIQMTQSPSSLSASVGDRVTITCQASQDISNYLNWYQQKPGKAPKLLIYDASNLETGVPSRFSGSGSGTDFTFTISRLQPEDTATYFCQHFDHLPLAFGGGTKVEIKGATPPETGAETESPGETTGGSAESEPPGEGQVQLQESGPGAVKPSETLSLTCTVSGGSVSSGDYYWTWIRQSPGKGLEWIGHIYYSGNTNYNPSLKSRLTISIDTSKTQFSLKLSSVTAADTATYYCVRDRVTGAFDIWGQGTTVTVSS

SEQ ID NO: 49 - protein, 256 aa, Artificial Sequence
  Description of Artificial Sequence: Synthetic polypeptide
DIQMTQSPSSLSASVGDRVTITCQASQDISNYLNWYQQKPGKAPKLLIYDASNLETGVPSRFSGSGSGTDFTFTISRLQPEDTATYFCQHFDHLPLAFGGGTKVEIKGATPPETGAETESPGETTGGSAESEPPGEGQVQLQESGPGLVKPSQTLSLTCTVSGGSVSSGDYYWTWIRQRPGKGLEWIGHIYYSGNTNYNPSLKSRLTISIDTSKTQFSLKLSSVTAADTAIYYCVRDRVTGAFDIWGQGTMVTVSS

SEQ ID NO: 50 - protein, 256 aa, Artificial Sequence
  Description of Artificial Sequence: Synthetic polypeptide
DIQMTQSPSSLSASVGDRVTITCQASQDISNYLNWYQQKPGKAPKLLIYDASNLETGVPSRFSGSGSGTDFTFTISRLQPEDTATYFCQHFDHLPLAFGGGTKVEIKGATPPETGAETESPGETTGGSAESEPPGEGQVQLQESGPGAVKPSQTLSLTCTVSGGSVSSGDYYWTWIRQRPGKGLEWIGHIYYSGNTNYNPSLKSRLTISIDTSKTQFSLKLSSVTAADTATYYCVRDRVTGAFDIWGQGTAVTVSS

SEQ ID NO: 51 - protein, 256 aa, Artificial Sequence
  Description of Artificial Sequence: Synthetic polypeptide
DIQMTQSPSSLSASVGDRVTITCQASQDISNYLNWYQQKPGKAPKLLIYDASNLETGVPSRFSGSGSGTDFTFTISRLQPEDTATYFCQHFDHLPLAFGGGTKVEIKGATPPETGAETESPGETTGGSAESEPPGEGQVQLQESGPGAVKPSQTLSLTCTVSGGSVSSGDYYWTWIRQRPGKGLEWIGHIYYSGNTNYNPSLKSRLTISIDTSKTQFSLKLSSVTAADTATYYCVRDRVTGAFDIWGQGTTVTVSS

SEQ ID NO: 52 - protein, 256 aa, Artificial Sequence
  Description of Artificial Sequence: Synthetic polypeptide
DIQMTQSPSSLSASVGDRVTITCQASQDISNYLNWYQQKPGKAPKLLIYDASNLETGVPSRFSGSGSGTDFTFTISSLQPEDIATYFCQHFDHLPLAFGGGTKVEIKGATPPETGAETESPGETTGGSAESEPPGEGQVQLQESGPGLVKPSETLSLTCTVSGGSVSSGDYYWTWIRQSPGKGLEWIGHIYYSGNTNYNPSLKSRLTISIDTSKTQFSLKLSSVTAADTAIYYCVRDRVTGAFDIWGQGTMVTVSS

SEQ ID NO: 53 - protein, 16 aa, Artificial Sequence
  Description of Artificial Sequence: Synthetic peptide
EAGRSANHEPLGLVAT

SEQ ID NO: 54 - protein, 16 aa, Artificial Sequence
  Description of Artificial Sequence: Synthetic peptide
ASGRSTNAGPSGLAGP

SEQ ID NO: 55 - protein, 16 aa, Artificial Sequence
  Description of Artificial Sequence: Synthetic peptide
ASGRSTNAGPQGLAGQ

SEQ ID NO: 56 - protein, 16 aa, Artificial Sequence
  Description of Artificial Sequence: Synthetic peptide
ASGRSTNAGPPGLTGP

SEQ ID NO: 57 - protein, 16 aa, Artificial Sequence
  Description of Artificial Sequence: Synthetic peptide
ASSRGTNAGPAGLTGP

SEQ ID NO: 58 - protein, 16 aa, Artificial Sequence
  Description of Artificial Sequence: Synthetic peptide
ASSRTTNTGPSTLTGP

SEQ ID NO: 59 - protein, 16 aa, Artificial Sequence
  Description of Artificial Sequence: Synthetic peptide
AAGRSDNGTPLELVAP

SEQ ID NO: 60 - protein, 16 aa, Artificial Sequence
  Description of Artificial Sequence: Synthetic peptide
ASGRGTNAGPAGLTGP

SEQ ID NO: 61 - protein, 16 aa, Artificial Sequence
  Description of Artificial Sequence: Synthetic peptide
LFGRNDNHEPLELGGG

SEQ ID NO: 62 - protein, 16 aa, Artificial Sequence
  Description of Artificial Sequence: Synthetic peptide
TAGRSDNLEPLGLVFG

SEQ ID NO: 63 - protein, 16 aa, Artificial Sequence
  Description of Artificial Sequence: Synthetic peptide
LDGRSDNFHPPELVAG

SEQ ID NO: 64 - protein, 16 aa, Artificial Sequence
  Description of Artificial Sequence: Synthetic peptide
LEGRSDNEEPENLVAG

SEQ ID NO: 65 - protein, 16 aa, Artificial Sequence
  Description of Artificial Sequence: Synthetic peptide
LKGRSDNNAPLALVAG

SEQ ID NO: 66 - protein, 16 aa, Artificial Sequence
  Description of Artificial Sequence: Synthetic peptide
VYSRGTNAGPHGLTGR

SEQ ID NO: 67 - protein, 16 aa, Artificial Sequence
  Description of Artificial Sequence: Synthetic peptide
ANSRGTNKGFAGLIGP

SEQ ID NO: 68 - protein, 16 aa, Artificial Sequence
  Description of Artificial Sequence: Synthetic peptide
ASSRLTNEAPAGLTIP

SEQ ID NO: 69 - protein, 16 aa, Artificial Sequence
  Description of Artificial Sequence: Synthetic peptide
DQSRGTNAGPEGLTDP

SEQ ID NO: 70 - protein, 16 aa, Artificial Sequence
  Description of Artificial Sequence: Synthetic peptide
ESSRGTNIGQGGLTGP

SEQ ID NO: 71 - protein, 16 aa, Artificial Sequence
  Description of Artificial Sequence: Synthetic peptide
SSSRGTNQDPAGLTIP

SEQ ID NO: 72 - protein, 16 aa, Artificial Sequence
  Description of Artificial Sequence: Synthetic peptide
ASSRGQNHSPMGLTGP

SEQ ID NO: 73 - protein, 16 aa, Artificial Sequence
  Description of Artificial Sequence: Synthetic peptide
AYSRGPNAGPAGLEGR

SEQ ID NO: 74 - protein, 16 aa, Artificial Sequence
  Description of Artificial Sequence: Synthetic peptide
ASERGNNAGPANLTGF

SEQ ID NO: 75 - protein, 16 aa, Artificial Sequence
  Description of Artificial Sequence: Synthetic peptide
ASHRGTNPKPAILTGP

SEQ ID NO: 76 - protein, 16 aa, Artificial Sequence
  Description of Artificial Sequence: Synthetic peptide
MSSRRTNANPAQLTGP

SEQ ID NO: 77 - protein, 16 aa, Artificial Sequence
  Description of Artificial Sequence: Synthetic peptide
GAGRTDNHEPLELGAA

SEQ ID NO: 78 - protein, 16 aa, Artificial Sequence
  Description of Artificial Sequence: Synthetic peptide
LAGRSENTAPLELTAG

SEQ ID NO: 79 - protein, 16 aa, Artificial Sequence
  Description of Artificial Sequence: Synthetic peptide
LEGRPDNHEPLALVAS

SEQ ID NO: 80 - protein, 16 aa, Artificial Sequence
  Description of Artificial Sequence: Synthetic peptide
LSGRSDNEEPLALPAG

SEQ ID NO: 81 - protein, 16 aa, Artificial Sequence
  Description of Artificial Sequence: Synthetic peptide
EAGRTDNHEPLELSAP

SEQ ID NO: 82 - protein, 16 aa, Artificial Sequence
  Description of Artificial Sequence: Synthetic peptide
EGGRSDNHGPLELVSG

SEQ ID NO: 83 - protein, 16 aa, Artificial Sequence
  Description of Artificial Sequence: Synthetic peptide
LSGRSDNEAPLELEAG

SEQ ID NO: 84 - protein, 16 aa, Artificial Sequence
  Description of Artificial Sequence: Synthetic peptide
LGGRADNHEPPELGAG

SEQ ID NO: 85 - protein, 16 aa, Artificial Sequence
  Description of Artificial Sequence: Synthetic peptide
PPSRGTNAEPAGLTGE

SEQ ID NO: 86 - protein, 16 aa, Artificial Sequence
  Description of Artificial Sequence: Synthetic peptide
ASTRGENAGPAGLEAP

SEQ ID NO: 87 - protein, 16 aa, Artificial Sequence
  Description of Artificial Sequence: Synthetic peptide
ESSRGTNGAPEGLTGP

SEQ ID NO: 88 - protein, 16 aa, Artificial Sequence
  Description of Artificial Sequence: Synthetic peptide
ASSRATNESPAGLTGE

SEQ ID NO: 89 - protein, 16 aa, Artificial Sequence
  Description of Artificial Sequence: Synthetic peptide
ASSRGENPPPGGLTGP

SEQ ID NO: 90 - protein, 16 aa, Artificial Sequence
  Description of Artificial Sequence: Synthetic peptide
AASRGTNTGPAELTGS

SEQ ID NO: 91 - protein, 16 aa, Artificial Sequence
  Description of Artificial Sequence: Synthetic peptide
AGSRTTNAGPGGLEGP

SEQ ID NO: 92 - protein, 16 aa, Artificial Sequence
  Description of Artificial Sequence: Synthetic peptide
APSRGENAGPATLTGA

SEQ ID NO: 93 - protein, 16 aa, Artificial Sequence
  Description of Artificial Sequence: Synthetic peptide
ESGRAANTGPPTLTAP

SEQ ID NO: 94 - protein, 16 aa, Artificial Sequence
  Description of Artificial Sequence: Synthetic peptide
NPGRAANEGPPGLPGS

SEQ ID NO: 95 - protein, 16 aa, Artificial Sequence
  Description of Artificial Sequence: Synthetic peptide
ESSRAANLTPPELTGP

SEQ ID NO: 96 - protein, 16 aa, Artificial Sequence
  Description of Artificial Sequence: Synthetic peptide
ASGRAANETPPGLTGA

SEQ ID NO: 97 - protein, 16 aa, Artificial Sequence
  Description of Artificial Sequence: Synthetic peptide
NSGRGENLGAPGLTGT

SEQ ID NO: 98 - protein, 16 aa, Artificial Sequence
  Description of Artificial Sequence: Synthetic peptide
TTGRAANLTPAGLTGP

SEQ ID NO: 99 - protein, 16 aa, Artificial Sequence
  Description of Artificial Sequence: Synthetic peptide
EAGRSANHTPAGLTGP

SEQ ID NO: 100 - protein, 16 aa, Artificial Sequence
  Description of Artificial Sequence: Synthetic peptide
ESGRAANTTPAGLTGP

SEQ ID NO: 101 - protein, 19 aa, Artificial Sequence
  Description of Artificial Sequence: Synthetic peptide
TTGRATEAANLTPAGLTGP

SEQ ID NO: 102 - protein, 19 aa, Artificial Sequence
  Description of Artificial Sequence: Synthetic peptide
TTGRAEEAANLTPAGLTGP

SEQ ID NO: 103 - protein, 19 aa, Artificial Sequence
  Description of Artificial Sequence: Synthetic peptide
TTGRAGEAANLTPAGLTGP

SEQ ID NO: 104 - protein, 19 aa, Artificial Sequence
  Description of Artificial Sequence: Synthetic peptide
TTGRATEAANATPAGLTGP

SEQ ID NO: 105 - protein, 19 aa, Artificial Sequence
  Description of Artificial Sequence: Synthetic peptide
TTGRAGEAEGATSAGATGP

SEQ ID NO: 106 - protein, 19 aa, Artificial Sequence
  Description of Artificial Sequence: Synthetic peptide
TTGEAGEAANATSAGATGP

SEQ ID NO: 107 - protein, 19 aa, Artificial Sequence
  Description of Artificial Sequence: Synthetic peptide
TTGEAGEAAGLTPAGLTGP

SEQ ID NO: 108 - protein, 19 aa, Artificial Sequence
  Description of Artificial Sequence: Synthetic peptide
TTGAAGEAANATPAGLTGP

SEQ ID NO: 109 - protein, 19 aa, Artificial Sequence
  Description of Artificial Sequence: Synthetic peptide
TTGRAGEAAGLTPAGLTGP

SEQ ID NO: 110 - protein, 19 aa, Artificial Sequence
  Description of Artificial Sequence: Synthetic peptide
TTGRAGEAANATSAGATGP

SEQ ID NO: 111 - protein, 19 aa, Artificial Sequence
  Description of Artificial Sequence: Synthetic peptide
TTGEAGEAAGATSAGATGP

SEQ ID NO: 112 - protein, 16 aa, Artificial Sequence
  Description of Artificial Sequence: Synthetic peptide
ESGRAANTEPPELGAG

SEQ ID NO: 113 - protein, 16 aa, Artificial Sequence
  Description of Artificial Sequence: Synthetic peptide
ESGRAANTAPEGLTGP

SEQ ID NO: 114 - protein, 16 aa, Artificial Sequence
  Description of Artificial Sequence: Synthetic peptide
EPGRAANHEPSGLTEG

SEQ ID NO: 115 - protein, 19 aa, Artificial Sequence
  Description of Artificial Sequence: Synthetic peptide
ESGRAANHTGAPPGGLTGP

SEQ ID NO: 116 - protein, 19 aa, Artificial Sequence
  Description of Artificial Sequence: Synthetic peptide
TTGRTGEGANATPGGLTGP

SEQ ID NO: 117 - protein, 19 aa, Artificial Sequence
  Description of Artificial Sequence: Synthetic peptide
RTGRSGEAANETPEGLEGP

SEQ ID NO: 118 - protein, 19 aa, Artificial Sequence
  Description of Artificial Sequence: Synthetic peptide
RTGRTGESANETPAGLGGP

SEQ ID NO: 119 - protein, 19 aa, Artificial Sequence
  Description of Artificial Sequence: Synthetic peptide
STGRTGEPANETPAGLSGP

SEQ ID NO: 120 - protein, 19 aa, Artificial Sequence
  Description of Artificial Sequence: Synthetic peptide
TTGRAGEPANATPTGLSGP

SEQ ID NO: 121 - protein, 19 aa, Artificial Sequence
  Description of Artificial Sequence: Synthetic peptide
RTGRPGEGANATPTGLPGP

SEQ ID NO: 122 - protein, 19 aa, Artificial Sequence
  Description of Artificial Sequence: Synthetic peptide
RTGRGGEAANATPSGLGGP

SEQ ID NO: 123 - protein, 19 aa, Artificial Sequence
  Description of Artificial Sequence: Synthetic peptide
STGRSGESANATPGGLGGP

SEQ ID NO: 124 - protein, 19 aa, Artificial Sequence
  Description of Artificial Sequence: Synthetic peptide
RTGRTGEEANATPAGLPGP

SEQ ID NO: 125 - protein, 19 aa, Artificial Sequence
  Description of Artificial Sequence: Synthetic peptide
ATGRPGEPANTTPEGLEGP

SEQ ID NO: 126 - protein, 19 aa, Artificial Sequence
  Description of Artificial Sequence: Synthetic peptide
STGRSGEPANATPGGLTGP

SEQ ID NO: 127 - protein, 19 aa, Artificial Sequence
  Description of Artificial Sequence: Synthetic peptide
PTGRGGEGANTTPTGLPGP

SEQ ID NO: 128 - protein, 19 aa, Artificial Sequence
  Description of Artificial Sequence: Synthetic peptide
PTGRSGEGANATPSGLTGP

SEQ ID NO: 129 - protein, 19 aa, Artificial Sequence
  Description of Artificial Sequence: Synthetic peptide
TTGRASEGANSTPAPLTEP

SEQ ID NO: 130 - protein, 19 aa, Artificial Sequence
  Description of Artificial Sequence: Synthetic peptide
TYGRAAEAANTTPAGLTAP

SEQ ID NO: 131 - protein, 19 aa, Artificial Sequence
  Description of Artificial Sequence: Synthetic peptide
TTGRATEGANATPAELTEP

SEQ ID NO: 132 - protein, 19 aa, Artificial Sequence
  Description of Artificial Sequence: Synthetic peptide
TVGRASEEANTTPASLTGP

SEQ ID NO: 133 - protein, 19 aa, Artificial Sequence
  Description of Artificial Sequence: Synthetic peptide
TTGRAPEAANATPAPLTGP

SEQ ID NO: 134 - protein, 19 aa, Artificial Sequence
  Description of Artificial Sequence: Synthetic peptide
TWGRATEPANATPAPLTSP

SEQ ID NO: 135 - protein, 19 aa, Artificial Sequence
  Description of Artificial Sequence: Synthetic peptide
TVGRASESANATPAELTSP

SEQ ID NO: 136 - protein, 19 aa, Artificial Sequence
  Description of Artificial Sequence: Synthetic peptide
TVGRAPEGANSTPAGLTGP

SEQ ID NO: 137 - protein, 19 aa, Artificial Sequence
  Description of Artificial Sequence: Synthetic peptide
TWGRATEAPNLEPATLTTP

SEQ ID NO: 138 - protein, 19 aa, Artificial Sequence
  Description of Artificial Sequence: Synthetic peptide
TTGRATEAPNLTPAPLTEP

SEQ ID NO: 139 - protein, 19 aa, Artificial Sequence
  Description of Artificial Sequence: Synthetic peptide
TQGRATEAPNLSPAALTSP

SEQ ID NO: 140 - protein, 19 aa, Artificial Sequence
  Description of Artificial Sequence: Synthetic peptide
TQGRAAEAPNLTPATLTAP

SEQ ID NO: 141 - protein, 19 aa, Artificial Sequence
  Description of Artificial Sequence: Synthetic peptide
TSGRAPEATNLAPAPLTGP

SEQ ID NO: 142 - protein, 19 aa, Artificial Sequence
  Description of Artificial Sequence: Synthetic peptide
TQGRAAEAANLTPAGLTEP

SEQ ID NO: 143 - protein, 19 aa, Artificial Sequence
  Description of Artificial Sequence: Synthetic peptide
TTGRAGSAPNLPPTGLTTP

SEQ ID NO: 144 - protein, 19 aa, Artificial Sequence
  Description of Artificial Sequence: Synthetic peptide
TTGRAGGAENLPPEGLTAP

SEQ ID NO: 145 - protein, 19 aa, Artificial Sequence
  Description of Artificial Sequence: Synthetic peptide
TTSRAGTATNLTPEGLTAP

SEQ ID NO: 146 - protein, 19 aa, Artificial Sequence
  Description of Artificial Sequence: Synthetic peptide
TTGRAGTATNLPPSGLTTP

SEQ ID NO: 147 - protein, 19 aa, Artificial Sequence
  Description of Artificial Sequence: Synthetic peptide
TTARAGEAENLSPSGLTAP

SEQ ID NO: 148 - protein, 19 aa, Artificial Sequence
  Description of Artificial Sequence: Synthetic peptide
TTGRAGGAGNLAPGGLTEP

SEQ ID NO: 149 - protein, 19 aa, Artificial Sequence
  Description of Artificial Sequence: Synthetic peptide
TTGRAGTATNLPPEGLTGP

SEQ ID NO: 150 - protein, 19 aa, Artificial Sequence
  Description of Artificial Sequence: Synthetic peptide
TTGRAGGAANLAPTGLTEP

SEQ ID NO: 151 - protein, 19 aa, Artificial Sequence
  Description of Artificial Sequence: Synthetic peptide
TTGRAGTAENLAPSGLTTP

SEQ ID NO: 152 - protein, 19 aa, Artificial Sequence
  Description of Artificial Sequence: Synthetic peptide
TTGRAGSATNLGPGGLTGP

SEQ ID NO: 153 - protein, 19 aa, Artificial Sequence
  Description of Artificial Sequence: Synthetic peptide
TTARAGGAENLTPAGLTEP

SEQ ID NO: 154 - protein, 19 aa, Artificial Sequence
  Description of Artificial Sequence: Synthetic peptide
TTARAGSAENLSPSGLTGP

SEQ ID NO: 155 - protein, 19 aa, Artificial Sequence
  Description of Artificial Sequence: Synthetic peptide
TTARAGGAGNLAPEGLTTP

SEQ ID NO: 156 - protein, 19 aa, Artificial Sequence
  Description of Artificial Sequence: Synthetic peptide
TTSRAGAAENLTPTGLTGP

SEQ ID NO: 157 - protein, 19 aa, Artificial Sequence
  Description of Artificial Sequence: Synthetic peptide
TYGRTTTPGNEPPASLEAE

SEQ ID NO: 158 - protein, 19 aa, Artificial Sequence
  Description of Artificial Sequence: Synthetic peptide
TYSRGESGPNEPPPGLTGP

SEQ ID NO: 159 - protein, 19 aa, Artificial Sequence
  Description of Artificial Sequence: Synthetic peptide
AWGRTGASENETPAPLGGE

SEQ ID NO: 160 - protein, 19 aa, Artificial Sequence
  Description of Artificial Sequence: Synthetic peptide
RWGRAETTPNTPPEGLETE

SEQ ID NO: 161 - protein, 19 aa, Artificial Sequence
  Description of Artificial Sequence: Synthetic peptide
ESGRAANHTGAEPPELGAG

SEQ ID NO: 162 - protein, 19 aa, Artificial Sequence
  Description of Artificial Sequence: Synthetic peptide
TTGRAGEAANLTPAGLTES

SEQ ID NO: 163 - protein, 19 aa, Artificial Sequence
  Description of Artificial Sequence: Synthetic peptide
TTGRAGEAANLTPAALTES

SEQ ID NO: 164 - protein, 19 aa, Artificial Sequence
  Description of Artificial Sequence: Synthetic peptide
TTGRAGEAANLTPAPLTES

SEQ ID NO: 165 - protein, 19 aa, Artificial Sequence
  Description of Artificial Sequence: Synthetic peptide
TTGRAGEAANLTPEPLTES

SEQ ID NO: 166 - protein, 19 aa, Artificial Sequence
  Description of Artificial Sequence: Synthetic peptide
TTGRAGEAANLTPAGLTGA

SEQ ID NO: 167 - protein, 19 aa, Artificial Sequence
  Description of Artificial Sequence: Synthetic peptide
TTGRAGEAANLTPEGLTGA

SEQ ID NO: 168 - protein, 19 aa, Artificial Sequence
  Description of Artificial Sequence: Synthetic peptide
TTGRAGEAANLTPEPLTGA

SEQ ID NO: 169 - protein, 19 aa, Artificial Sequence
  Description of Artificial Sequence: Synthetic peptide
TTGRAGEAANLTPAGLTEA

SEQ ID NO: 170 - protein, 19 aa, Artificial Sequence
  Description of Artificial Sequence: Synthetic peptide
TTGRAGEAANLTPEGLTEA

SEQ ID NO: 171 - protein, 19 aa, Artificial Sequence
  Description of Artificial Sequence: Synthetic peptide
TTGRAGEAANLTPAPLTEA

SEQ ID NO: 172 - protein, 19 aa, Artificial Sequence
  Description of Artificial Sequence: Synthetic peptide
TTGRAGEAANLTPEPLTEA

SEQ ID NO: 173 - protein, 19 aa, Artificial Sequence
  Description of Artificial Sequence: Synthetic peptide
TTGRAGEAANLTPEPLTGP

SEQ ID NO: 174 - protein, 19 aa, Artificial Sequence
  Description of Artificial Sequence: Synthetic peptide
TTGRAGEAANLTPAGLTGG

SEQ ID NO: 175 - protein, 19 aa, Artificial Sequence
  Description of Artificial Sequence: Synthetic peptide
TTGRAGEAANLTPEGLTGG

SEQ ID NO: 176 - protein, 19 aa, Artificial Sequence
  Description of Artificial Sequence: Synthetic peptide
TTGRAGEAANLTPEALTGG

SEQ ID NO: 177 - protein, 19 aa, Artificial Sequence
  Description of Artificial Sequence: Synthetic peptide
TTGRAGEAANLTPEPLTGG

SEQ ID NO: 178 - protein, 19 aa, Artificial Sequence
  Description of Artificial Sequence: Synthetic peptide
TTGRAGEAANLTPAGLTEG

SEQ ID NO: 179 - protein, 19 aa, Artificial Sequence
  Description of Artificial Sequence: Synthetic peptide
TTGRAGEAANLTPEGLTEG

SEQ ID NO: 180 - protein, 19 aa, Artificial Sequence
  Description of Artificial Sequence: Synthetic peptide
TTGRAGEAANLTPAPLTEG

SEQ ID NO: 181 - protein, 19 aa, Artificial Sequence
  Description of Artificial Sequence: Synthetic peptide
TTGRAGEAANLTPEPLTEG

SEQ ID NO: 182 - protein, 29 aa, Artificial Sequence
  Description of Artificial Sequence: Synthetic peptide
GSAPGSAGGYAELRMGGAIATSGSETPGT

SEQ ID NO: 183 - protein, 29 aa, Artificial Sequence
  Description of Artificial Sequence: Synthetic peptide
GSAPGTGGGYAPLRMGGGAATSGSETPGT

SEQ ID NO: 184 - protein, 29 aa, Artificial Sequence
  Description of Artificial Sequence: Synthetic peptide
GSAPGAEGGYAALRMGGEIATSGSETPGT

SEQ ID NO: 185 - protein, 29 aa, Artificial Sequence
  Description of Artificial Sequence: Synthetic peptide
GSAPGGPGGYALLRMGGPAATSGSETPGT

SEQ ID NO: 186 - protein, 29 aa, Artificial Sequence
  Description of Artificial Sequence: Synthetic peptide
GSAPGEAGGYAFLRMGGSIATSGSETPGT

SEQ ID NO: 187 - protein, 29 aa, Artificial Sequence
  Description of Artificial Sequence: Synthetic peptide
GSAPGPGGGYASLRMGGTAATSGSETPGT

SEQ ID NO: 188 - protein, 29 aa, Artificial Sequence
  Description of Artificial Sequence: Synthetic peptide
GSAPGSEGGYATLRMGGAIATSGSETPGT

SEQ ID NO: 189 - protein, 29 aa, Artificial Sequence
  Description of Artificial Sequence: Synthetic peptide
GSAPGTPGGYANLRMGGGAATSGSETPGT

SEQ ID NO: 190 - protein, 29 aa, Artificial Sequence
  Description of Artificial Sequence: Synthetic peptide
GSAPGASGGYAHLRMGGEIATSGSETPGT

SEQ ID NO: 191 - protein, 29 aa, Artificial Sequence
  Description of Artificial Sequence: Synthetic peptide
GSAPGGTGGYGELRMGGPAATSGSETPGT

SEQ ID NO: 192 - protein, 29 aa, Artificial Sequence
  Description of Artificial Sequence: Synthetic peptide
GSAPGEAGGYPELRMGGSIATSGSETPGT

SEQ ID NO: 193 - protein, 29 aa, Artificial Sequence
  Description of Artificial Sequence: Synthetic peptide
GSAPGPGGGYVELRMGGTAATSGSETPGT

SEQ ID NO: 194 - protein, 29 aa, Artificial Sequence
  Description of Artificial Sequence: Synthetic peptide
GSAPGSEGGYLELRMGGAIATSGSETPGT

SEQ ID NO: 195 - protein, 29 aa, Artificial Sequence
  Description of Artificial Sequence: Synthetic peptide
GSAPGTPGGYSELRMGGGAATSGSETPGT

SEQ ID NO: 196 - protein, 29 aa, Artificial Sequence
  Description of Artificial Sequence: Synthetic peptide
GSAPGASGGYTELRMGGEIATSGSETPGT

SEQ ID NO: 197 - protein, 29 aa, Artificial Sequence
  Description of Artificial Sequence: Synthetic peptide
GSAPGGTGGYQELRMGGPAATSGSETPGT

SEQ ID NO: 198 - protein, 29 aa, Artificial Sequence
  Description of Artificial Sequence: Synthetic peptide
GSAPGEAGGYEELRMGGSIATSGSETPGT

SEQ ID NO: 199 - protein, 29 aa, Artificial Sequence
  Description of Artificial Sequence: Synthetic peptide
GSAPGPGIGPAELRMGGTAATSGSETPGT

SEQ ID NO: 200 - protein, 29 aa, Artificial Sequence
  Description of Artificial Sequence: Synthetic peptide
GSAPGSEIGAAELRMGGAIATSGSETPGT

SEQ ID NO: 201 - protein, 29 aa, Artificial Sequence
  Description of Artificial Sequence: Synthetic peptide
GSAPGTPIGSAELRMGGGAATSGSETPGT

SEQ ID NO: 202 - protein, 29 aa, Artificial Sequence
  Description of Artificial Sequence: Synthetic peptide
GSAPGASIGTAELRMGGEIATSGSETPGT

SEQ ID NO: 203 - protein, 29 aa, Artificial Sequence
  Description of Artificial Sequence: Synthetic peptide
GSAPGGTIGNAELRMGGPAATSGSETPGT

SEQ ID NO: 204 - protein, 29 aa, Artificial Sequence
  Description of Artificial Sequence: Synthetic peptide
GSAPGEAIGQAELRMGGSIATSGSETPGT

SEQ ID NO: 205 - protein, 29 aa, Artificial Sequence
  Description of Artificial Sequence: Synthetic peptide
GSAPGPGGPYAELRMGGTAATSGSETPGT

SEQ ID NO: 206 - protein, 29 aa, Artificial Sequence
  Description of Artificial Sequence: Synthetic peptide
GSAPGSEGAYAELRMGGAIATSGSETPGT

SEQ ID NO: 207 - protein, 29 aa, Artificial Sequence
  Description of Artificial Sequence: Synthetic peptide
GSAPGTPGVYAELRMGGGAATSGSETPGT

SEQ ID NO: 208 - protein, 29 aa, Artificial Sequence
  Description of Artificial Sequence: Synthetic peptide
GSAPGASGLYAELRMGGEIATSGSETPGT

SEQ ID NO: 209 - protein, 29 aa, Artificial Sequence
  Description of Artificial Sequence: Synthetic peptide
GSAPGGTGIYAELRMGGPAATSGSETPGT

SEQ ID NO: 210 - protein, 29 aa, Artificial Sequence
  Description of Artificial Sequence: Synthetic peptide
GSAPGEAGFYAELRMGGSIATSGSETPGT

SEQ ID NO: 211 - protein, 29 aa, Artificial Sequence
  Description of Artificial Sequence: Synthetic peptide
GSAPGPGGYYAELRMGGTAATSGSETPGT

SEQ ID NO: 212 - protein, 29 aa, Artificial Sequence
  Description of Artificial Sequence: Synthetic peptide
GSAPGSEGSYAELRMGGAIATSGSETPGT

SEQ ID NO: 213 - protein, 29 aa, Artificial Sequence
  Description of Artificial Sequence: Synthetic peptide
GSAPGTPGNYAELRMGGGAATSGSETPGT

SEQ ID NO: 214 - protein, 29 aa, Artificial Sequence
  Description of Artificial Sequence: Synthetic peptide
GSAPGASGEYAELRMGGEIATSGSETPGT

SEQ ID NO: 215 - protein, 29 aa, Artificial Sequence
  Description of Artificial Sequence: Synthetic peptide
GSAPGGTGHYAELRMGGPAATSGSETPGT

SEQ ID NO: 216 - protein, 29 aa, Artificial Sequence
  Description of Artificial Sequence: Synthetic peptide
GSAPGEAGGYAEARMGGSIATSGSETPGT

SEQ ID NO: 217 - protein, 29 aa, Artificial Sequence
  Description of Artificial Sequence: Synthetic peptide
GSAPGPGGGYAEVRMGGTAATSGSETPGT

SEQ ID NO: 218 - protein, 29 aa, Artificial Sequence
  Description of Artificial Sequence: Synthetic peptide
GSAPGSEGGYAEIRMGGAIATSGSETPGT

SEQ ID NO: 219 - protein, 29 aa, Artificial Sequence
  Description of Artificial Sequence: Synthetic peptide
GSAPGTPGGYAEFRMGGGAATSGSETPGT

SEQ ID NO: 220 - protein, 29 aa, Artificial Sequence
  Description of Artificial Sequence: Synthetic peptide
GSAPGASGGYAEYRMGGEIATSGSETPGT

SEQ ID NO: 221 - protein, 29 aa, Artificial Sequence
  Description of Artificial Sequence: Synthetic peptide
GSAPGGTGGYAESRMGGPAATSGSETPGT

SEQ ID NO: 222 - protein, 29 aa, Artificial Sequence
  Description of Artificial Sequence: Synthetic peptide
GSAPGEAGGYAETRMGGSIATSGSETPGT

SEQ ID NO: 223 - protein, 29 aa, Artificial Sequence
  Description of Artificial Sequence: Synthetic peptide
GSAPGPGGGYAELAMGGTRATSGSETPGT

SEQ ID NO: 224 - protein, 29 aa, Artificial Sequence
  Description of Artificial Sequence: Synthetic peptide
GSAPGSEGGYAELVMGGARATSGSETPGT

SEQ ID NO: 225 - protein, 29 aa, Artificial Sequence
  Description of Artificial Sequence: Synthetic peptide
GSAPGTPGGYAELLMGGGRATSGSETPGT

SEQ ID NO: 226 - protein, 29 aa, Artificial Sequence
  Description of Artificial Sequence: Synthetic peptide
GSAPGASGGYAELIMGGERATSGSETPGT

SEQ ID NO: 227 - protein, 29 aa, Artificial Sequence
  Description of Artificial Sequence: Synthetic peptide
GSAPGGTGGYAELWMGGPRATSGSETPGT

SEQ ID NO: 228 - protein, 29 aa, Artificial Sequence
  Description of Artificial Sequence: Synthetic peptide
GSAPGEAGGYAELSMGGSRATSGSETPGT

SEQ ID NO: 229 - protein, 29 aa, Artificial Sequence
  Description of Artificial Sequence: Synthetic peptide
GSAPGPGGGYAELTMGGTRATSGSETPGT

SEQ ID NO: 230 - protein, 29 aa, Artificial Sequence
  Description of Artificial Sequence: Synthetic peptide
GSAPGSEGGYAELQMGGARATSGSETPGT

SEQ ID NO: 231 - protein, 29 aa, Artificial Sequence
  Description of Artificial Sequence: Synthetic peptide
GSAPGTPGGYAELNMGGGRATSGSETPGT

SEQ ID NO: 232 - protein, 29 aa, Artificial Sequence
  Description of Artificial Sequence: Synthetic peptide
GSAPGASGGYAELEMGGERATSGSETPGT

SEQ ID NO: 233 - protein, 29 aa, Artificial Sequence
  Description of Artificial Sequence: Synthetic peptide
GSAPGGTGGYAELRPGGPIATSGSETPGT

SEQ ID NO: 234 - protein, 29 aa, Artificial Sequence
  Description of Artificial Sequence: Synthetic peptide
GSAPGEAGGYAELRAGGSAATSGSETPGT

SEQ ID NO: 235 - protein, 29 aa, Artificial Sequence
  Description of Artificial Sequence: Synthetic peptide
GSAPGPGGGYAELRLGGTIATSGSETPGT

SEQ ID NO: 236 - protein, 29 aa, Artificial Sequence
  Description of Artificial Sequence: Synthetic peptide
GSAPGSEGGYAELRIGGAAATSGSETPGT

SEQ ID NO: 237 - protein, 29 aa, Artificial Sequence
  Description of Artificial Sequence: Synthetic peptide
GSAPGTPGGYAELRSGGGIATSGSETPGT

SEQ ID NO: 238 - protein, 29 aa, Artificial Sequence
  Description of Artificial Sequence: Synthetic peptide
GSAPGASGGYAELRNGGEAATSGSETPGT

SEQ ID NO: 239 - protein, 29 aa, Artificial Sequence
  Description of Artificial Sequence: Synthetic peptide
GSAPGGTGGYAELRQGGPIATSGSETPGT

SEQ ID NO: 240 - protein, 29 aa, Artificial Sequence
  Description of Artificial Sequence: Synthetic peptide
GSAPGEAGGYAELRDGGSAATSGSETPGT

SEQ ID NO: 241 - protein, 29 aa, Artificial Sequence
  Description of Artificial Sequence: Synthetic peptide
GSAPGPGGGYAELREGGTIATSGSETPGT

SEQ ID NO: 242 - protein, 29 aa, Artificial Sequence
  Description of Artificial Sequence: Synthetic peptide
GSAPGSEGGYAELRHGGAAATSGSETPGT

SEQ ID NO: 243 - protein, 29 aa, Artificial Sequence
  Description of Artificial Sequence: Synthetic peptide
GSAPGTPGGYAELRMPGGIATSGSETPGT

SEQ ID NO: 244 - protein, 29 aa, Artificial Sequence
  Description of Artificial Sequence: Synthetic peptide
GSAPGASGGYAELRMAGEAATSGSETPGT

SEQ ID NO: 245 - protein, 29 aa, Artificial Sequence
  Description of Artificial Sequence: Synthetic peptide
GSAPGGTGGYAELRMVGPIATSGSETPGT

SEQ ID NO: 246 - protein, 29 aa, Artificial Sequence
  Description of Artificial Sequence: Synthetic peptide
GSAPGEAGGYAELRMLGSAATSGSETPGT

SEQ ID NO: 247 - protein, 29 aa, Artificial Sequence
  Description of Artificial Sequence: Synthetic peptide
GSAPGPGGGYAELRMIGTIATSGSETPGT

SEQ ID NO: 248 - protein, 29 aa, Artificial Sequence
  Description of Artificial Sequence: Synthetic peptide
GSAPGSEGGYAELRMYGAIATSGSETPGT

SEQ ID NO: 249 - protein, 29 aa, Artificial Sequence
  Description of Artificial Sequence: Synthetic peptide
GSAPGTPGGYAELRMSGGAATSGSETPGT

SEQ ID NO: 250 - protein, 29 aa, Artificial Sequence
  Description of Artificial Sequence: Synthetic peptide
GSAPGASGGYAELRMNGEIATSGSETPGT

SEQ ID NO: 251 - protein, 29 aa, Artificial Sequence
  Description of Artificial Sequence: Synthetic peptide
GSAPGGTGGYAELRMQGPAATSGSETPGT

SEQ ID NO: 252 - protein, 29 aa, Artificial Sequence
  Description of Artificial Sequence: Synthetic peptide
GSAPGANHTPAGLTGPGARATSGSETPGT

SEQ ID NO: 253 - protein, 29 aa, Artificial Sequence
  Description of Artificial Sequence: Synthetic peptide
GSAPGANTAPEGLTGPSTRATSGSETPGT

SEQ ID NO: 254 - protein, 29 aa, Artificial Sequence
  Description of Artificial Sequence: Synthetic peptide
GSAPGTGAPPGGLTGPGTRATSGSETPGT

SEQ ID NO: 255 - protein, 29 aa, Artificial Sequence
  Description of Artificial Sequence: Synthetic peptide
GSAPGANHEPSGLTEGSPRATSGSETPGT

SEQ ID NO: 256 - protein, 29 aa, Artificial Sequence
  Description of Artificial Sequence: Synthetic peptide
GSAPGANTEPPELGAGTERATSGSETPGT

SEQ ID NO: 257 - protein, 29 aa, Artificial Sequence
  Description of Artificial Sequence: Synthetic peptide
GSAPGASGPPPGLTGPPGRATSGSETPGT

SEQ ID NO: 258 - protein, 29 aa, Artificial Sequence
  Description of Artificial Sequence: Synthetic peptide
GSAPGASGTPAPLGGEPGRATSGSETPGT

SEQ ID NO: 259 - protein, 29 aa, Artificial Sequence
  Description of Artificial Sequence: Synthetic peptide
GSAPGPAGPPEGLETEAGRATSGSETPGT

SEQ ID NO: 260 - protein, 29 aa, Artificial Sequence
  Description of Artificial Sequence: Synthetic peptide
GSAPGPTSGQGGLTGPESRATSGSETPGT

SEQ ID NO: 261 - protein, 29 aa, Artificial Sequence
  Description of Artificial Sequence: Synthetic peptide
GSAPGSAGGAANLVRGGAIATSGSETPGT

SEQ ID NO: 262 - protein, 29 aa, Artificial Sequence
  Description of Artificial Sequence: Synthetic peptide
GSAPGTGGGAAPLVRGGGAATSGSETPGT

SEQ ID NO: 263 - protein, 29 aa, Artificial Sequence
  Description of Artificial Sequence: Synthetic peptide
GSAPGAEGGAAALVRGGEIATSGSETPGT

SEQ ID NO: 264 - protein, 29 aa, Artificial Sequence
  Description of Artificial Sequence: Synthetic peptide
GSAPGGPGGAALLVRGGPAATSGSETPGT

SEQ ID NO: 265 - protein, 29 aa, Artificial Sequence
  Description of Artificial Sequence: Synthetic peptide
GSAPGEAGGAAFLVRGGSIATSGSETPGT

SEQ ID NO: 266 - protein, 29 aa, Artificial Sequence
  Description of Artificial Sequence: Synthetic peptide
GSAPGPGGGAASLVRGGTAATSGSETPGT

SEQ ID NO: 267 - protein, 29 aa, Artificial Sequence
  Description of Artificial Sequence: Synthetic peptide
GSAPGSEGGAATLVRGGAIATSGSETPGT

SEQ ID NO: 268 - protein, 29 aa, Artificial Sequence
  Description of Artificial Sequence: Synthetic peptide
GSAPGTPGGAAGLVRGGGAATSGSETPGT

SEQ ID NO: 269 - protein, 29 aa, Artificial Sequence
  Description of Artificial Sequence: Synthetic peptide
GSAPGASGGAADLVRGGEIATSGSETPGT

SEQ ID NO: 270 - protein, 29 aa, Artificial Sequence
  Description of Artificial Sequence: Synthetic peptide
GSAPGGTGGAGNLVRGGPAATSGSETPGT

SEQ ID NO: 271 - protein, 29 aa, Artificial Sequence
  Description of Artificial Sequence: Synthetic peptide
GSAPGEAGGAPNLVRGGSIATSGSETPGT

SEQ ID NO: 272 - protein, 29 aa, Artificial Sequence
  Description of Artificial Sequence: Synthetic peptide
GSAPGPGGGAVNLVRGGTAATSGSETPGT

SEQ ID NO: 273 - protein, 29 aa, Artificial Sequence
  Description of Artificial Sequence: Synthetic peptide
GSAPGSEGGALNLVRGGAIATSGSETPGT

SEQ ID NO: 274 - protein, 29 aa, Artificial Sequence
  Description of Artificial Sequence: Synthetic peptide
GSAPGTPGGASNLVRGGGAATSGSETPGT

SEQ ID NO: 275 - protein, 29 aa, Artificial Sequence
  Description of Artificial Sequence: Synthetic peptide
GSAPGASGGATNLVRGGEIATSGSETPGT

SEQ ID NO: 276 - protein, 29 aa, Artificial Sequence
  Description of Artificial Sequence: Synthetic peptide
GSAPGGTGGAQNLVRGGPAATSGSETPGT

SEQ ID NO: 277 - protein, 29 aa, Artificial Sequence
  Description of Artificial Sequence: Synthetic peptide
GSAPGEAGGAENLVRGGSIATSGSETPGT

SEQ ID NO: 278 - protein, 30 aa, Artificial Sequence
  Description of Artificial Sequence: Synthetic polypeptide
GSAPEAGRSANHEPLGLVATATSGSETPGT

SEQ ID NO: 279 - protein, 30 aa, Artificial Sequence
  Description of Artificial Sequence: Synthetic polypeptide
GSAPASGRSTNAGPSGLAGPATSGSETPGT

SEQ ID NO: 280 - protein, 30 aa, Artificial Sequence
  Description of Artificial Sequence: Synthetic polypeptide
GSAPASGRSTNAGPQGLAGQATSGSETPGT

SEQ ID NO: 281 - protein, 30 aa, Artificial Sequence
  Description of Artificial Sequence: Synthetic polypeptide
GSAPASGRSTNAGPPGLTGPATSGSETPGT

SEQ ID NO: 282 - protein, 30 aa, Artificial Sequence
  Description of Artificial Sequence: Synthetic polypeptide
GSAPASSRGTNAGPAGLTGPATSGSETPGT

SEQ ID NO: 283 - protein, 30 aa, Artificial Sequence
  Description of Artificial Sequence: Synthetic polypeptide
GSAPASSRTTNTGPSTLTGPATSGSETPGT

SEQ ID NO: 284 - protein, 30 aa, Artificial Sequence
  Description of Artificial Sequence: Synthetic polypeptide
GSAPAAGRSDNGTPLELVAPATSGSETPGT

SEQ ID NO: 285 - protein, 30 aa, Artificial Sequence
  Description of Artificial Sequence: Synthetic polypeptide
GSAPASGRGTNAGPAGLTGPATSGSETPGT

SEQ ID NO: 286 - protein, 30 aa, Artificial Sequence
  Description of Artificial Sequence: Synthetic polypeptide
GSAPLFGRNDNHEPLELGGGATSGSETPGT

SEQ ID NO: 287 - protein, 30 aa, Artificial Sequence
  Description of Artificial Sequence: Synthetic polypeptide
GSAPTAGRSDNLEPLGLVFGATSGSETPGT

SEQ ID NO: 288 - protein, 30 aa, Artificial Sequence
  Description of Artificial Sequence: Synthetic polypeptide
GSAPLDGRSDNFHPPELVAGATSGSETPGT

SEQ ID NO: 289 - protein, 30 aa, Artificial Sequence
  Description of Artificial Sequence: Synthetic polypeptide
GSAPLEGRSDNEEPENLVAGATSGSETPGT

SEQ ID NO: 290 - protein, 30 aa, Artificial Sequence
  Description of Artificial Sequence: Synthetic polypeptide
GSAPLKGRSDNNAPLALVAGATSGSETPGT

SEQ ID NO: 291 - protein, 30 aa, Artificial Sequence
  Description of Artificial Sequence: Synthetic polypeptide
GSAPVYSRGTNAGPHGLTGRATSGSETPGT

SEQ ID NO: 292 - protein, 30 aa, Artificial Sequence
  Description of Artificial Sequence: Synthetic polypeptide
GSAPANSRGTNKGFAGLIGPATSGSETPGT

SEQ ID NO: 293 - protein, 30 aa, Artificial Sequence
  Description of Artificial Sequence: Synthetic polypeptide
GSAPASSRLTNEAPAGLTIPATSGSETPGT

SEQ ID NO: 294 - protein, 30 aa, Artificial Sequence
  Description of Artificial Sequence: Synthetic polypeptide
GSAPDQSRGTNAGPEGLTDPATSGSETPGT

SEQ ID NO: 295 - protein, 30 aa, Artificial Sequence
  Description of Artificial Sequence: Synthetic polypeptide
GSAPESSRGTNIGQGGLTGPATSGSETPGT

SEQ ID NO: 296 - protein, 30 aa, Artificial Sequence
  Description of Artificial Sequence: Synthetic polypeptide
GSAPSSSRGTNQDPAGLTIPATSGSETPGT

SEQ ID NO: 297 - protein, 30 aa, Artificial Sequence
  Description of Artificial Sequence: Synthetic polypeptide
GSAPASSRGQNHSPMGLTGPATSGSETPGT

SEQ ID NO: 298 - protein, 30 aa, Artificial Sequence
  Description of Artificial Sequence: Synthetic polypeptide
GSAPAYSRGPNAGPAGLEGRATSGSETPGT

SEQ ID NO: 299 - protein, 30 aa, Artificial Sequence
  Description of Artificial Sequence: Synthetic polypeptide
GSAPASERGNNAGPANLTGFATSGSETPGT

SEQ ID NO: 300 - protein, 30 aa, Artificial Sequence
  Description of Artificial Sequence: Synthetic polypeptide
GSAPASHRGTNPKPAILTGPATSGSETPGT

SEQ ID NO: 301 - protein, 30 aa, Artificial Sequence
  Description of Artificial Sequence: Synthetic polypeptide
GSAPMSSRRTNANPAQLTGPATSGSETPGT

SEQ ID NO: 302 - protein, 30 aa, Artificial Sequence
  Description of Artificial Sequence: Synthetic polypeptide
GSAPGAGRTDNHEPLELGAAATSGSETPGT

SEQ ID NO: 303 - protein, 30 aa, Artificial Sequence
  Description of Artificial Sequence: Synthetic polypeptide
GSAPLAGRSENTAPLELTAGATSGSETPGT

SEQ ID NO: 304 - protein, 30 aa, Artificial Sequence
  Description of Artificial Sequence: Synthetic polypeptide
GSAPLEGRPDNHEPLALVASATSGSETPGT

SEQ ID NO: 305 - protein, 30 aa, Artificial Sequence
  Description of Artificial Sequence: Synthetic polypeptide
GSAPLSGRSDNEEPLALPAGATSGSETPGT

SEQ ID NO: 306 - protein, 30 aa, Artificial Sequence
  Description of Artificial Sequence: Synthetic polypeptide
GSAPEAGRTDNHEPLELSAPATSGSETPGT

SEQ ID NO: 307 - protein, 30 aa, Artificial Sequence
  Description of Artificial Sequence: Synthetic polypeptide
GSAPEGGRSDNHGPLELVSGATSGSETPGT

SEQ ID NO: 308 - protein, 30 aa, Artificial Sequence
  Description of Artificial Sequence: Synthetic polypeptide
GSAPLSGRSDNEAPLELEAGATSGSETPGT

SEQ ID NO: 309 - protein, 30 aa, Artificial Sequence
  Description of Artificial Sequence: Synthetic polypeptide
GSAPLGGRADNHEPPELGAGATSGSETPGT

SEQ ID NO: 310 - protein, 30 aa, Artificial Sequence
  Description of Artificial Sequence: Synthetic polypeptide
GSAPPPSRGTNAEPAGLTGEATSGSETPGT

SEQ ID NO: 311 - protein, 30 aa, Artificial Sequence
  Description of Artificial Sequence: Synthetic polypeptide
GSAPASTRGENAGPAGLEAPATSGSETPGT

SEQ ID NO: 312 - protein, 30 aa, Artificial Sequence
  Description of Artificial Sequence: Synthetic polypeptide
GSAPESSRGTNGAPEGLTGPATSGSETPGT

SEQ ID NO: 313 - protein, 30 aa, Artificial Sequence
  Description of Artificial Sequence: Synthetic polypeptide
GSAPASSRATNESPAGLTGEATSGSETPGT

SEQ ID NO: 314 - protein, 30 aa, Artificial Sequence
  Description of Artificial Sequence: Synthetic polypeptide
GSAPASSRGENPPPGGLTGPATSGSETPGT

SEQ ID NO: 315 - protein, 30 aa, Artificial Sequence
  Description of Artificial Sequence: Synthetic polypeptide
GSAPAASRGTNTGPAELTGSATSGSETPGT

SEQ ID NO: 316 - protein, 30 aa, Artificial Sequence
  Description of Artificial Sequence: Synthetic polypeptide
GSAPAGSRTTNAGPGGLEGPATSGSETPGT

SEQ ID NO: 317 - protein, 30 aa, Artificial Sequence
  Description of Artificial Sequence: Synthetic polypeptide
GSAPAPSRGENAGPATLTGAATSGSETPGT

SEQ ID NO: 318 - protein, 30 aa, Artificial Sequence
  Description of Artificial Sequence: Synthetic polypeptide
GSAPESGRAANTGPPTLTAPATSGSETPGT

SEQ ID NO: 319 - protein, 30 aa, Artificial Sequence
  Description of Artificial Sequence: Synthetic polypeptide
GSAPNPGRAANEGPPGLPGSATSGSETPGT

SEQ ID NO: 320 - protein, 30 aa, Artificial Sequence
  Description of Artificial Sequence: Synthetic polypeptide
GSAPESSRAANLTPPELTGPATSGSETPGT

SEQ ID NO: 321 - protein, 30 aa, Artificial Sequence
  Description of Artificial Sequence: Synthetic polypeptide
GSAPASGRAANETPPGLTGAATSGSETPGT

SEQ ID NO: 322 - protein, 30 aa, Artificial Sequence
  Description of Artificial Sequence: Synthetic polypeptide
GSAPNSGRGENLGAPGLTGTATSGSETPGT

SEQ ID NO: 323 - protein, 30 aa, Artificial Sequence
  Description of Artificial Sequence: Synthetic polypeptide
GSAPTTGRAANLTPAGLTGPATSGSETPGT

SEQ ID NO: 324 - protein, 30 aa, Artificial Sequence
  Description of Artificial Sequence: Synthetic polypeptide
GSAPEAGRSANHTPAGLTGPATSGSETPGT

SEQ ID NO: 325 - protein, 30 aa, Artificial Sequence
  Description of Artificial Sequence: Synthetic polypeptide
GSAPESGRAANTTPAGLTGPATSGSETPGT

SEQ ID NO: 326 - protein, 33 aa, Artificial Sequence
  Description of Artificial Sequence: Synthetic polypeptide
GSAPTTGRATEAANLTPAGLTGPATSGSETPGT

SEQ ID NO: 327 - protein, 33 aa, Artificial Sequence
  Description of Artificial Sequence: Synthetic polypeptide
GSAPTTGRAEEAANLTPAGLTGPATSGSETPGT

SEQ ID NO: 328 - protein, 33 aa, Artificial Sequence
  Description of Artificial Sequence: Synthetic polypeptide
GSAPTTGRAGEAANLTPAGLTGPATSGSETPGT

SEQ ID NO: 329 - protein, 33 aa, Artificial Sequence
  Description of Artificial Sequence: Synthetic polypeptide
GSAPTTGRATEAANATPAGLTGPATSGSETPGT

SEQ ID NO: 330 - protein, 33 aa, Artificial Sequence
  Description of Artificial Sequence: Synthetic polypeptide
GSAPTTGRAGEAEGATSAGATGPATSGSETPGT

SEQ ID NO: 331 - protein, 33 aa, Artificial Sequence
  Description of Artificial Sequence: Synthetic polypeptide
GSAPTTGEAGEAANATSAGATGPATSGSETPGT

SEQ ID NO: 332 - protein, 33 aa, Artificial Sequence
  Description of Artificial Sequence: Synthetic polypeptide
GSAPTTGEAGEAAGLTPAGLTGPATSGSETPGT

SEQ ID NO: 333 - protein, 33 aa, Artificial Sequence
  Description of Artificial Sequence: Synthetic polypeptide
GSAPTTGAAGEAANATPAGLTGPATSGSETPGT

SEQ ID NO: 334 - protein, 33 aa, Artificial Sequence
  Description of Artificial Sequence: Synthetic polypeptide
GSAPTTGRAGEAAGLTPAGLTGPATSGSETPGT

SEQ ID NO: 335 - protein, 33 aa, Artificial Sequence
  Description of Artificial Sequence: Synthetic polypeptide
GSAPTTGRAGEAANATSAGATGPATSGSETPGT

SEQ ID NO: 336 - protein, 33 aa, Artificial Sequence
  Description of Artificial Sequence: Synthetic polypeptide
GSAPTTGEAGEAAGATSAGATGPATSGSETPGT

SEQ ID NO: 337 - protein, 30 aa, Artificial Sequence
  Description of Artificial Sequence: Synthetic polypeptide
GSAPESGRAANTEPPELGAGATSGSETPGT

SEQ ID NO: 338 - protein, 30 aa, Artificial Sequence
  Description of Artificial Sequence: Synthetic polypeptide
GSAPESGRAANTAPEGLTGPATSGSETPGT

SEQ ID NO: 339 - protein, 30 aa, Artificial Sequence
  Description of Artificial Sequence: Synthetic polypeptide
GSAPEPGRAANHEPSGLTEGATSGSETPGT

SEQ ID NO: 340 - protein, 33 aa, Artificial Sequence
  Description of Artificial Sequence: Synthetic polypeptide
GSAPESGRAANHTGAPPGGLTGPATSGSETPGT

SEQ ID NO: 341 - protein, 33 aa, Artificial Sequence
  Description of Artificial Sequence: Synthetic polypeptide
GSAPTTGRTGEGANATPGGLTGPATSGSETPGT

SEQ ID NO: 342 - protein, 33 aa, Artificial Sequence
  Description of Artificial Sequence: Synthetic polypeptide
GSAPRTGRSGEAANETPEGLEGPATSGSETPGT

SEQ ID NO: 343 - protein, 33 aa, Artificial Sequence
  Description of Artificial Sequence: Synthetic polypeptide
GSAPRTGRTGESANETPAGLGGPATSGSETPGT

SEQ ID NO: 344 - protein, 33 aa, Artificial Sequence
  Description of Artificial Sequence: Synthetic polypeptide
GSAPSTGRTGEPANETPAGLSGPATSGSETPGT

SEQ ID NO: 345 - protein, 33 aa, Artificial Sequence
  Description of Artificial Sequence: Synthetic polypeptide
GSAPTTGRAGEPANATPTGLSGPATSGSETPGT

SEQ ID NO: 346 - protein, 33 aa, Artificial Sequence
  Description of Artificial Sequence: Synthetic polypeptide
GSAPRTGRPGEGANATPTGLPGPATSGSETPGT

SEQ ID NO: 347 - protein, 33 aa, Artificial Sequence
  Description of Artificial Sequence: Synthetic polypeptide
GSAPRTGRGGEAANATPSGLGGPATSGSETPGT

SEQ ID NO: 348 - protein, 33 aa, Artificial Sequence
  Description of Artificial Sequence: Synthetic polypeptide
GSAPSTGRSGESANATPGGLGGPATSGSETPGT

SEQ ID NO: 349 - protein, 33 aa, Artificial Sequence
  Description of Artificial Sequence: Synthetic polypeptide
GSAPRTGRTGEEANATPAGLPGPATSGSETPGT

SEQ ID NO: 350 - protein, 33 aa, Artificial Sequence
  Description of Artificial Sequence: Synthetic polypeptide
GSAPATGRPGEPANTTPEGLEGPATSGSETPGT

SEQ ID NO: 351 - protein, 33 aa, Artificial Sequence
  Description of Artificial Sequence: Synthetic polypeptide
GSAPSTGRSGEPANATPGGLTGPATSGSETPGT

SEQ ID NO: 352 - protein, 33 aa, Artificial Sequence
  Description of Artificial Sequence: Synthetic polypeptide
GSAPPTGRGGEGANTTPTGLPGPATSGSETPGT

SEQ ID NO: 353 - protein, 33 aa, Artificial Sequence
  Description of Artificial Sequence: Synthetic polypeptide
GSAPPTGRSGEGANATPSGLTGPATSGSETPGT

SEQ ID NO: 354 - protein, 33 aa, Artificial Sequence
  Description of Artificial Sequence: Synthetic polypeptide
GSAPTTGRASEGANSTPAPLTEPATSGSETPGT

SEQ ID NO: 355 - protein, 33 aa, Artificial Sequence
  Description of Artificial Sequence: Synthetic polypeptide
GSAPTYGRAAEAANTTPAGLTAPATSGSETPGT

SEQ ID NO: 356 - protein, 33 aa, Artificial Sequence
  Description of Artificial Sequence: Synthetic polypeptide
GSAPTTGRATEGANATPAELTEPATSGSETPGT

SEQ ID NO: 357 - protein, 33 aa, Artificial Sequence
  Description of Artificial Sequence: Synthetic polypeptide
GSAPTVGRASEEANTTPASLTGPATSGSETPGT

SEQ ID NO: 358 - protein, 33 aa, Artificial Sequence
  Description of Artificial Sequence: Synthetic polypeptide
GSAPTTGRAPEAANATPAPLTGPATSGSETPGT

SEQ ID NO: 359 - protein, 33 aa, Artificial Sequence
  Description of Artificial Sequence: Synthetic polypeptide
GSAPTWGRATEPANATPAPLTSPATSGSETPGT

SEQ ID NO: 360 - protein, 33 aa, Artificial Sequence
  Description of Artificial Sequence: Synthetic polypeptide
GSAPTVGRASESANATPAELTSPATSGSETPGT

SEQ ID NO: 361 - protein, 33 aa, Artificial Sequence
  Description of Artificial Sequence: Synthetic polypeptide
GSAPTVGRAPEGANSTPAGLTGPATSGSETPGT

SEQ ID NO: 362 - protein, 33 aa, Artificial Sequence
  Description of Artificial Sequence: Synthetic polypeptide
GSAPTWGRATEAPNLEPATLTTPATSGSETPGT

SEQ ID NO: 363 - protein, 33 aa, Artificial Sequence
  Description of Artificial Sequence: Synthetic polypeptide
GSAPTTGRATEAPNLTPAPLTEPATSGSETPGT

SEQ ID NO: 364 - protein, 33 aa, Artificial Sequence
  Description of Artificial Sequence: Synthetic polypeptide
GSAPTQGRATEAPNLSPAALTSPATSGSETPGT

SEQ ID NO: 365 - protein, 33 aa, Artificial Sequence
  Description of Artificial Sequence: Synthetic polypeptide
GSAPTQGRAAEAPNLTPATLTAPATSGSETPGT

SEQ ID NO: 366 - protein, 33 aa, Artificial Sequence
  Description of Artificial Sequence: Synthetic polypeptide
GSAPTSGRAPEATNLAPAPLTGPATSGSETPGT

SEQ ID NO: 367 - protein, 33 aa, Artificial Sequence
  Description of Artificial Sequence: Synthetic polypeptide
GSAPTQGRAAEAANLTPAGLTEPATSGSETPGT

SEQ ID NO: 368 - protein, 33 aa, Artificial Sequence
  Description of Artificial Sequence: Synthetic polypeptide
GSAPTTGRAGSAPNLPPTGLTTPATSGSETPGT

SEQ ID NO: 369 - protein, 33 aa, Artificial Sequence
  Description of Artificial Sequence: Synthetic polypeptide
GSAPTTGRAGGAENLPPEGLTAPATSGSETPGT

SEQ ID NO: 370 - protein, 33 aa, Artificial Sequence
  Description of Artificial Sequence: Synthetic polypeptide
GSAPTTSRAGTATNLTPEGLTAPATSGSETPGT

SEQ ID NO: 371 - protein, 33 aa, Artificial Sequence
  Description of Artificial Sequence: Synthetic polypeptide
GSAPTTGRAGTATNLPPSGLTTPATSGSETPGT

SEQ ID NO: 372 - protein, 33 aa, Artificial Sequence
  Description of Artificial Sequence: Synthetic polypeptide
GSAPTTARAGEAENLSPSGLTAPATSGSETPGT

SEQ ID NO: 373 - protein, 33 aa, Artificial Sequence
  Description of Artificial Sequence: Synthetic polypeptide
GSAPTTGRAGGAGNLAPGGLTEPATSGSETPGT

SEQ ID NO: 374 - protein, 33 aa, Artificial Sequence
  Description of Artificial Sequence: Synthetic polypeptide
GSAPTTGRAGTATNLPPEGLTGPATSGSETPGT

SEQ ID NO: 375 - protein, 33 aa, Artificial Sequence
  Description of Artificial Sequence: Synthetic polypeptide
GSAPTTGRAGGAANLAPTGLTEPATSGSETPGT

SEQ ID NO: 376 - protein, 33 aa, Artificial Sequence
  Description of Artificial Sequence: Synthetic polypeptide
GSAPTTGRAGTAENLAPSGLTTPATSGSETPGT

SEQ ID NO: 377 - protein, 33 aa, Artificial Sequence
  Description of Artificial Sequence: Synthetic polypeptide
GSAPTTGRAGSATNLGPGGLTGPATSGSETPGT

SEQ ID NO: 378 - protein, 33 aa, Artificial Sequence
  Description of Artificial Sequence: Synthetic polypeptide
GSAPTTARAGGAENLTPAGLTEPATSGSETPGT

SEQ ID NO: 379 - protein, 33 aa, Artificial Sequence
  Description of Artificial Sequence: Synthetic polypeptide
GSAPTTARAGSAENLSPSGLTGPATSGSETPGT

SEQ ID NO: 380 - protein, 33 aa, Artificial Sequence
  Description of Artificial Sequence: Synthetic polypeptide
GSAPTTARAGGAGNLAPEGLTTPATSGSETPGT

SEQ ID NO: 381 - protein, 33 aa, Artificial Sequence
  Description of Artificial Sequence: Synthetic polypeptide
GSAPTTSRAGAAENLTPTGLTGPATSGSETPGT

SEQ ID NO: 382 - protein, 33 aa, Artificial Sequence
  Description of Artificial Sequence: Synthetic polypeptide
GSAPTYGRTTTPGNEPPASLEAEATSGSETPGT

SEQ ID NO: 383 - protein, 33 aa, Artificial Sequence
  Description of Artificial Sequence: Synthetic polypeptide
GSAPTYSRGESGPNEPPPGLTGPATSGSETPGT

SEQ ID NO: 384 - protein, 33 aa, Artificial Sequence
  Description of Artificial Sequence: Synthetic polypeptide
GSAPAWGRTGASENETPAPLGGEATSGSETPGT

SEQ ID NO: 385 - protein, 33 aa, Artificial Sequence
  Description of Artificial Sequence: Synthetic polypeptide
GSAPRWGRAETTPNTPPEGLETEATSGSETPGT

SEQ ID NO: 386 - protein, 33 aa, Artificial Sequence
  Description of Artificial Sequence: Synthetic polypeptide
GSAPESGRAANHTGAEPPELGAGATSGSETPGT

SEQ ID NO: 387 - protein, 33 aa, Artificial Sequence
  Description of Artificial Sequence: Synthetic polypeptide
GSAPTTGRAGEAANLTPAGLTESATSGSETPGT

SEQ ID NO: 388 - protein, 33 aa, Artificial Sequence
  Description of Artificial Sequence: Synthetic polypeptide
GSAPTTGRAGEAANLTPAALTESATSGSETPGT

SEQ ID NO: 389 - protein, 33 aa, Artificial Sequence
  Description of Artificial Sequence: Synthetic polypeptide
GSAPTTGRAGEAANLTPAPLTESATSGSETPGT

SEQ ID NO: 390 - protein, 33 aa, Artificial Sequence
  Description of Artificial Sequence: Synthetic polypeptide
GSAPTTGRAGEAANLTPEPLTESATSGSETPGT

SEQ ID NO: 391 - protein, 33 aa, Artificial Sequence
  Description of Artificial Sequence: Synthetic polypeptide
GSAPTTGRAGEAANLTPAGLTGAATSGSETPGT

SEQ ID NO: 392 - protein, 33 aa, Artificial Sequence
  Description of Artificial Sequence: Synthetic polypeptide
GSAPTTGRAGEAANLTPEGLTGAATSGSETPGT

SEQ ID NO: 393 - protein, 33 aa, Artificial Sequence
  Description of Artificial Sequence: Synthetic polypeptide
GSAPTTGRAGEAANLTPEPLTGAATSGSETPGT

SEQ ID NO: 394 - protein, 33 aa, Artificial Sequence
  Description of Artificial Sequence: Synthetic polypeptide
GSAPTTGRAGEAANLTPAGLTEAATSGSETPGT

SEQ ID NO: 395 - protein, 33 aa, Artificial Sequence
  Description of Artificial Sequence: Synthetic polypeptide
GSAPTTGRAGEAANLTPEGLTEAATSGSETPGT

SEQ ID NO: 396 - protein, 33 aa, Artificial Sequence
  Description of Artificial Sequence: Synthetic polypeptide
GSAPTTGRAGEAANLTPAPLTEAATSGSETPGT

SEQ ID NO: 397 - protein, 33 aa, Artificial Sequence
  Description of Artificial Sequence: Synthetic polypeptide
GSAPTTGRAGEAANLTPEPLTEAATSGSETPGT

SEQ ID NO: 398 - protein, 33 aa, Artificial Sequence
  Description of Artificial Sequence: Synthetic polypeptide
GSAPTTGRAGEAANLTPEPLTGPATSGSETPGT

SEQ ID NO: 399 - protein, 33 aa, Artificial Sequence
  Description of Artificial Sequence: Synthetic polypeptide
GSAPTTGRAGEAANLTPAGLTGGATSGSETPGT

SEQ ID NO: 400 - protein, 33 aa, Artificial Sequence
  Description of Artificial Sequence: Synthetic polypeptide
GSAPTTGRAGEAANLTPEGLTGGATSGSETPGT

SEQ ID NO: 401 - protein, 33 aa, Artificial Sequence
  Description of Artificial Sequence: Synthetic polypeptide
GSAPTTGRAGEAANLTPEALTGGATSGSETPGT

SEQ ID NO: 402 - protein, 33 aa, Artificial Sequence
  Description of Artificial Sequence: Synthetic polypeptide
GSAPTTGRAGEAANLTPEPLTGGATSGSETPGT

SEQ ID NO: 403 - protein, 33 aa, Artificial Sequence
  Description of Artificial Sequence: Synthetic polypeptide
GSAPTTGRAGEAANLTPAGLTEGATSGSETPGT

SEQ ID NO: 404 - protein, 33 aa, Artificial Sequence
  Description of Artificial Sequence: Synthetic polypeptide
GSAPTTGRAGEAANLTPEGLTEGATSGSETPGT

SEQ ID NO: 405 - protein, 33 aa, Artificial Sequence
  Description of Artificial Sequence: Synthetic polypeptide
GSAPTTGRAGEAANLTPAPLTEGATSGSETPGT

SEQ ID NO: 406 - protein, 33 aa, Artificial Sequence
  Description of Artificial Sequence: Synthetic polypeptide
GSAPTTGRAGEAANLTPEPLTEGATSGSETPGT

SEQ ID NO: 407 - protein, 30 aa, Artificial Sequence
  Description of Artificial Sequence: Synthetic polypeptide
GSAPEAGRSAEATSAGATGPATSGSETPGT

SEQ ID NO: 408 - protein, 30 aa, Artificial Sequence
  Description of Artificial Sequence: Synthetic polypeptide
GSAPSASGTYSRGESGPGSPATSGSETPGT

SEQ ID NO: 409 - protein, 30 aa, Artificial Sequence
  Description of Artificial Sequence: Synthetic polypeptide
GSAPSASGEAGRTDTHPGSPATSGSETPGT

SEQ ID NO: 410 - protein, 30 aa, Artificial Sequence
  Description of Artificial Sequence: Synthetic polypeptide
GSAPSASGEPGRAAEHPGSPATSGSETPGT

SEQ ID NO: 411 - protein, 30 aa, Artificial Sequence
  Description of Artificial Sequence: Synthetic polypeptide
GSAPSPAGESSRGTTIAGSPATSGSETPGT

SEQ ID NO: 412 - protein, 30 aa, Artificial Sequence
  Description of Artificial Sequence: Synthetic polypeptide
GSAPEAGESAGATPAGLTGPATSGSETPGT

SEQ ID NO: 413 - protein, 30 aa, Artificial Sequence
  Description of Artificial Sequence: Synthetic polypeptide
GSAPSASGAPLELEAGPGSPATSGSETPGT

SEQ ID NO: 414 - protein, 30 aa, Artificial Sequence
  Description of Artificial Sequence: Synthetic polypeptide
GSAPSASGEPPELGAGPGSPATSGSETPGT

SEQ ID NO: 415 - protein, 30 aa, Artificial Sequence
  Description of Artificial Sequence: Synthetic polypeptide
GSAPSASGEPSGLTEGPGSPATSGSETPGT

SEQ ID NO: 416 - protein, 30 aa, Artificial Sequence
  Description of Artificial Sequence: Synthetic polypeptide
GSAPSASGTPAPLTEPPGSPATSGSETPGT

SEQ ID NO: 417 - protein, 30 aa, Artificial Sequence
  Description of Artificial Sequence: Synthetic polypeptide
GSAPSASGTPAELTEPPGSPATSGSETPGT

SEQ ID NO: 418 - protein, 30 aa, Artificial Sequence
  Description of Artificial Sequence: Synthetic polypeptide
GSAPSASGPPPGLTGPPGSPATSGSETPGT

SEQ ID NO: 419 - protein, 30 aa, Artificial Sequence
  Description of Artificial Sequence: Synthetic polypeptide
GSAPSASGTPAPLGGEPGSPATSGSETPGT

SEQ ID NO: 420 - protein, 30 aa, Artificial Sequence
  Description of Artificial Sequence: Synthetic polypeptide
GSAPSPAGAPEGLTGPAGSPATSGSETPGT

SEQ ID NO: 421 - protein, 30 aa, Artificial Sequence
  Description of Artificial Sequence: Synthetic polypeptide
GSAPSPAGPPEGLETEAGSPATSGSETPGT

SEQ ID NO: 422 - protein, 30 aa, Artificial Sequence
  Description of Artificial Sequence: Synthetic polypeptide
GSAPSPTSGQGGLTGPGSEPATSGSETPGT

SEQ ID NO: 423 - protein, 30 aa, Artificial Sequence
  Description of Artificial Sequence: Synthetic polypeptide
GSAPSESAPPEGLETESTEPATSGSETPGT

SEQ ID NO: 424 - protein, 30 aa, Artificial Sequence
  Description of Artificial Sequence: Synthetic polypeptide
GSAPSEGSEPLELGAASETPATSGSETPGT

SEQ ID NO: 425 - protein, 30 aa, Artificial Sequence
  Description of Artificial Sequence: Synthetic polypeptide
GSAPSEGSGPAGLEAPSETPATSGSETPGT

SEQ ID NO: 426 - protein, 30 aa, Artificial Sequence
  Description of Artificial Sequence: Synthetic polypeptide
GSAPSEPTPPASLEAEPGSPATSGSETPGT

SEQ ID NO: 427 - protein, 29 aa, Artificial Sequence
  Description of Artificial Sequence: Synthetic peptide
GTAEAASASGGSAGGYAELRMGGAIPGSP

SEQ ID NO: 428 - protein, 29 aa, Artificial Sequence
  Description of Artificial Sequence: Synthetic peptide
GTAEAASASGGTGGGYAPLRMGGGAPGSP

SEQ ID NO: 429 - protein, 29 aa, Artificial Sequence
  Description of Artificial Sequence: Synthetic peptide
GTAEAASASGGAEGGYAALRMGGEIPGSP

SEQ ID NO: 430 - protein, 29 aa, Artificial Sequence
  Description of Artificial Sequence: Synthetic peptide
GTAEAASASGGGPGGYALLRMGGPAPGSP

SEQ ID NO: 431 - protein, 29 aa, Artificial Sequence
  Description of Artificial Sequence: Synthetic peptide
GTAEAASASGGEAGGYAFLRMGGSIPGSP

SEQ ID NO: 432 - protein, 29 aa, Artificial Sequence
  Description of Artificial Sequence: Synthetic peptide
GTAEAASASGGPGGGYASLRMGGTAPGSP

SEQ ID NO: 433 - protein, 29 aa, Artificial Sequence
  Description of Artificial Sequence: Synthetic peptide
GTAEAASASGGSEGGYATLRMGGAIPGSP

SEQ ID NO: 434 - protein, 29 aa, Artificial Sequence
  Description of Artificial Sequence: Synthetic peptide
GTAEAASASGGTPGGYANLRMGGGAPGSP

SEQ ID NO: 435 - protein, 29 aa, Artificial Sequence
  Description of Artificial Sequence: Synthetic peptide
GTAEAASASGGASGGYAHLRMGGEIPGSP

SEQ ID NO: 436 - protein, 29 aa, Artificial Sequence
  Description of Artificial Sequence: Synthetic peptide
GTAEAASASGGGTGGYGELRMGGPAPGSP

SEQ ID NO: 437 - protein, 29 aa, Artificial Sequence
  Description of Artificial Sequence: Synthetic peptide
GTAEAASASGGEAGGYPELRMGGSIPGSP

SEQ ID NO: 438 - protein, 29 aa, Artificial Sequence
  Description of Artificial Sequence: Synthetic peptide
GTAEAASASGGPGGGYVELRMGGTAPGSP

SEQ ID NO: 439 - protein, 29 aa, Artificial Sequence
  Description of Artificial Sequence: Synthetic peptide
GTAEAASASGGSEGGYLELRMGGAIPGSP

SEQ ID NO: 440 - protein, 29 aa, Artificial Sequence
  Description of Artificial Sequence: Synthetic peptide
GTAEAASASGGTPGGYSELRMGGGAPGSP

SEQ ID NO: 441 - protein, 29 aa, Artificial Sequence
  Description of Artificial Sequence: Synthetic peptide
GTAEAASASGGASGGYTELRMGGEIPGSP

SEQ ID NO: 442 - protein, 29 aa, Artificial Sequence
  Description of Artificial Sequence: Synthetic peptide
GTAEAASASGGGTGGYQELRMGGPAPGSP

SEQ ID NO: 443 - protein, 29 aa, Artificial Sequence
  Description of Artificial Sequence: Synthetic peptide
GTAEAASASGGEAGGYEELRMGGSIPGSP

SEQ ID NO: 444 - protein, 29 aa, Artificial Sequence
  Description of Artificial Sequence: Synthetic peptide
GTAEAASASGGPGIGPAELRMGGTAPGSP

SEQ ID NO: 445 - protein, 29 aa, Artificial Sequence
  Description of Artificial Sequence: Synthetic peptide
GTAEAASASGGSEIGAAELRMGGAIPGSP

SEQ ID NO: 446 - protein, 29 aa, Artificial Sequence
  Description of Artificial Sequence: Synthetic peptide
GTAEAASASGGTPIGSAELRMGGGAPGSP

SEQ ID NO: 447 - protein, 29 aa, Artificial Sequence
  Description of Artificial Sequence: Synthetic peptide
GTAEAASASGGASIGTAELRMGGEIPGSP

SEQ ID NO: 448 - protein, 29 aa, Artificial Sequence
  Description of Artificial Sequence: Synthetic peptide
GTAEAASASGGGTIGNAELRMGGPAPGSP

SEQ ID NO: 449 - protein, 29 aa, Artificial Sequence
  Description of Artificial Sequence: Synthetic peptide
GTAEAASASGGEAIGQAELRMGGSIPGSP

SEQ ID NO: 450 - protein, 29 aa, Artificial Sequence
  Description of Artificial Sequence: Synthetic peptide
GTAEAASASGGPGGPYAELRMGGTAPGSP

SEQ ID NO: 451 - protein, 29 aa, Artificial Sequence
  Description of Artificial Sequence: Synthetic peptide
GTAEAASASGGSEGAYAELRMGGAIPGSP

SEQ ID NO: 452 - protein, 29 aa, Artificial Sequence
  Description of Artificial Sequence: Synthetic peptide
GTAEAASASGGTPGVYAELRMGGGAPGSP

SEQ ID NO: 453 - protein, 29 aa, Artificial Sequence
  Description of Artificial Sequence: Synthetic peptide
GTAEAASASGGASGLYAELRMGGEIPGSP

SEQ ID NO: 454 - protein, 29 aa, Artificial Sequence
  Description of Artificial Sequence: Synthetic peptide
GTAEAASASGGGTGIYAELRMGGPAPGSP

SEQ ID NO: 455 - protein, 29 aa, Artificial Sequence
  Description of Artificial Sequence: Synthetic peptide
GTAEAASASGGEAGFYAELRMGGSIPGSP

SEQ ID NO: 456 - protein, 29 aa, Artificial Sequence
  Description of Artificial Sequence: Synthetic peptide
GTAEAASASGGPGGYYAELRMGGTAPGSP

SEQ ID NO: 457 - protein, 29 aa, Artificial Sequence
  Description of Artificial Sequence: Synthetic peptide
GTAEAASASGGSEGSYAELRMGGAIPGSP

SEQ ID NO: 458 - protein, 29 aa, Artificial Sequence
  Description of Artificial Sequence: Synthetic peptide
GTAEAASASGGTPGNYAELRMGGGAPGSP

SEQ ID NO: 459 - protein, 29 aa, Artificial Sequence
  Description of Artificial Sequence: Synthetic peptide
GTAEAASASGGASGEYAELRMGGEIPGSP

SEQ ID NO: 460 - protein, 29 aa, Artificial Sequence
  Description of Artificial Sequence: Synthetic peptide
GTAEAASASGGGTGHYAELRMGGPAPGSP

SEQ ID NO: 461 - protein, 29 aa, Artificial Sequence
  Description of Artificial Sequence: Synthetic peptide
GTAEAASASGGEAGGYAEARMGGSIPGSP

SEQ ID NO: 462 - protein, 29 aa, Artificial Sequence
  Description of Artificial Sequence: Synthetic peptide
GTAEAASASGGPGGGYAEVRMGGTAPGSP

SEQ ID NO: 463 - protein, 29 aa, Artificial Sequence
  Description of Artificial Sequence: Synthetic peptide
GTAEAASASGGSEGGYAEIRMGGAIPGSP

SEQ ID NO: 464 - protein, 29 aa, Artificial Sequence
  Description of Artificial Sequence: Synthetic peptide
GTAEAASASGGTPGGYAEFRMGGGAPGSP

SEQ ID NO: 465 - protein, 29 aa, Artificial Sequence
  Description of Artificial Sequence: Synthetic peptide
GTAEAASASGGASGGYAEYRMGGEIPGSP

SEQ ID NO: 466 - protein, 29 aa, Artificial Sequence
  Description of Artificial Sequence: Synthetic peptide
GTAEAASASGGGTGGYAESRMGGPAPGSP

SEQ ID NO: 467 - protein, 29 aa, Artificial Sequence
  Description of Artificial Sequence: Synthetic peptide
GTAEAASASGGEAGGYAETRMGGSIPGSP

SEQ ID NO: 468 - protein, 29 aa, Artificial Sequence
  Description of Artificial Sequence: Synthetic peptide
GTAEAASASGGPGGGYAELAMGGTRPGSP

SEQ ID NO: 469 - protein, 29 aa, Artificial Sequence
  Description of Artificial Sequence: Synthetic peptide
GTAEAASASGGSEGGYAELVMGGARPGSP

SEQ ID NO: 470 - protein, 29 aa, Artificial Sequence
  Description of Artificial Sequence: Synthetic peptide
GTAEAASASGGTPGGYAELLMGGGRPGSP

SEQ ID NO: 471 - protein, 29 aa, Artificial Sequence
  Description of Artificial Sequence: Synthetic peptide
GTAEAASASGGASGGYAELIMGGERPGSP

SEQ ID NO: 472 - protein, 29 aa, Artificial Sequence
  Description of Artificial Sequence: Synthetic peptide
GTAEAASASGGGTGGYAELWMGGPRPGSP

SEQ ID NO: 473 - protein, 29 aa, Artificial Sequence
  Description of Artificial Sequence: Synthetic peptide
GTAEAASASGGEAGGYAELSMGGSRPGSP

SEQ ID NO: 474 - protein, 29 aa, Artificial Sequence
  Description of Artificial Sequence: Synthetic peptide
GTAEAASASGGPGGGYAELTMGGTRPGSP

SEQ ID NO: 475 - protein, 29 aa, Artificial Sequence
  Description of Artificial Sequence: Synthetic peptide
GTAEAASASGGSEGGYAELQMGGARPGSP

SEQ ID NO: 476 - protein, 29 aa, Artificial Sequence
  Description of Artificial Sequence: Synthetic peptide
GTAEAASASGGTPGGYAELNMGGGRPGSP

SEQ ID NO: 477 - protein, 29 aa, Artificial Sequence
  Description of Artificial Sequence: Synthetic peptide
GTAEAASASGGASGGYAELEMGGERPGSP

SEQ ID NO: 478 - protein, 29 aa, Artificial Sequence
  Description of Artificial Sequence: Synthetic peptide
GTAEAASASGGGTGGYAELRPGGPIPGSP

SEQ ID NO: 479 - protein, 29 aa, Artificial Sequence
  Description of Artificial Sequence: Synthetic peptide
GTAEAASASGGEAGGYAELRAGGSAPGSP

SEQ ID NO: 480 - protein, 29 aa, Artificial Sequence
  Description of Artificial Sequence: Synthetic peptide
GTAEAASASGGPGGGYAELRLGGTIPGSP

SEQ ID NO: 481 - protein, 29 aa, Artificial Sequence
  Description of Artificial Sequence: Synthetic peptide
GTAEAASASGGSEGGYAELRIGGAAPGSP

SEQ ID NO: 482 - protein, 29 aa, Artificial Sequence
  Description of Artificial Sequence: Synthetic peptide
GTAEAASASGGTPGGYAELRSGGGIPGSP

SEQ ID NO: 483 - protein, 29 aa, Artificial Sequence
  Description of Artificial Sequence: Synthetic peptide
GTAEAASASGGASGGYAELRNGGEAPGSP

SEQ ID NO: 484 - protein, 29 aa, Artificial Sequence
  Description of Artificial Sequence: Synthetic peptide
GTAEAASASGGGTGGYAELRQGGPIPGSP

SEQ ID NO: 485 - protein, 29 aa, Artificial Sequence
  Description of Artificial Sequence: Synthetic peptide
GTAEAASASGGEAGGYAELRDGGSAPGSP

SEQ ID NO: 486 - protein, 29 aa, Artificial Sequence
  Description of Artificial Sequence: Synthetic peptide
GTAEAASASGGPGGGYAELREGGTIPGSP

SEQ ID NO: 487 - protein, 29 aa, Artificial Sequence
  Description of Artificial Sequence: Synthetic peptide
GTAEAASASGGSEGGYAELRHGGAAPGSP

SEQ ID NO: 488 - protein, 29 aa, Artificial Sequence
  Description of Artificial Sequence: Synthetic peptide
GTAEAASASGGTPGGYAELRMPGGIPGSP

SEQ ID NO: 489 - protein, 29 aa, Artificial Sequence
  Description of Artificial Sequence: Synthetic peptide
GTAEAASASGGASGGYAELRMAGEAPGSP

SEQ ID NO: 490 - protein, 29 aa, Artificial Sequence
  Description of Artificial Sequence: Synthetic peptide
GTAEAASASGGGTGGYAELRMVGPIPGSP

SEQ ID NO: 491 - protein, 29 aa, Artificial Sequence
  Description of Artificial Sequence: Synthetic peptide
GTAEAASASGGEAGGYAELRMLGSAPGSP

SEQ ID NO: 492 - protein, 29 aa, Artificial Sequence
  Description of Artificial Sequence: Synthetic peptide
GTAEAASASGGPGGGYAELRMIGTIPGSP

SEQ ID NO: 493 - protein, 29 aa, Artificial Sequence
  Description of Artificial Sequence: Synthetic peptide
GTAEAASASGGSEGGYAELRMYGAIPGSP

SEQ ID NO: 494 - protein, 29 aa, Artificial Sequence
  Description of Artificial Sequence: Synthetic peptide
GTAEAASASGGTPGGYAELRMSGGAPGSP

SEQ ID NO: 495 - protein, 29 aa, Artificial Sequence
  Description of Artificial Sequence: Synthetic peptide
GTAEAASASGGASGGYAELRMNGEIPGSP

SEQ ID NO: 496 - protein, 29 aa, Artificial Sequence
  Description of Artificial Sequence: Synthetic peptide
GTAEAASASGGGTGGYAELRMQGPAPGSP

SEQ ID NO: 497 - protein, 29 aa, Artificial Sequence
  Description of Artificial Sequence: Synthetic peptide
GTAEAASASGGANHTPAGLTGPGARPGSP

SEQ ID NO: 498 - protein, 29 aa, Artificial Sequence
  Description of Artificial Sequence: Synthetic peptide
GTAEAASASGGANTAPEGLTGPSTRPGSP

SEQ ID NO: 499 - protein, 29 aa, Artificial Sequence
  Description of Artificial Sequence: Synthetic peptide
GTAEAASASGGTGAPPGGLTGPGTRPGSP

SEQ ID NO: 500 - protein, 29 aa, Artificial Sequence
  Description of Artificial Sequence: Synthetic peptide
GTAEAASASGGANHEPSGLTEGSPRPGSP

SEQ ID NO: 501 - protein, 29 aa, Artificial Sequence
  Description of Artificial Sequence: Synthetic peptide
GTAEAASASGGANTEPPELGAGTERPGSP

SEQ ID NO: 502 - protein, 29 aa, Artificial Sequence
  Description of Artificial Sequence: Synthetic peptide
GTAEAASASGGASGPPPGLTGPPGRPGSP

SEQ ID NO: 503 - protein, 29 aa, Artificial Sequence
  Description of Artificial Sequence: Synthetic peptide
GTAEAASASGGASGTPAPLGGEPGRPGSP

SEQ ID NO: 504 - protein, 29 aa, Artificial Sequence
  Description of Artificial Sequence: Synthetic peptide
GTAEAASASGGPAGPPEGLETEAGRPGSP

SEQ ID NO: 505 - protein, 29 aa, Artificial Sequence
  Description of Artificial Sequence: Synthetic peptide
GTAEAASASGGPTSGQGGLTGPESRPGSP

SEQ ID NO: 506 - protein, 29 aa, Artificial Sequence
  Description of Artificial Sequence: Synthetic peptide
GTAEAASASGGSAGGAANLVRGGAIPGSP

SEQ ID NO: 507 - protein, 29 aa, Artificial Sequence
  Description of Artificial Sequence: Synthetic peptide
GTAEAASASGGTGGGAAPLVRGGGAPGSP

SEQ ID NO: 508 - protein, 29 aa, Artificial Sequence
  Description of Artificial Sequence: Synthetic peptide
GTAEAASASGGAEGGAAALVRGGEIPGSP

SEQ ID NO: 509 - protein, 29 aa, Artificial Sequence
  Description of Artificial Sequence: Synthetic peptide
GTAEAASASGGGPGGAALLVRGGPAPGSP

SEQ ID NO: 510 - protein, 29 aa, Artificial Sequence
  Description of Artificial Sequence: Synthetic peptide
GTAEAASASGGEAGGAAFLVRGGSIPGSP

SEQ ID NO: 511 - protein, 29 aa, Artificial Sequence
  Description of Artificial Sequence: Synthetic peptide
GTAEAASASGGPGGGAASLVRGGTAPGSP

SEQ ID NO: 512 - protein, 29 aa, Artificial Sequence
  Description of Artificial Sequence: Synthetic peptide
GTAEAASASGGSEGGAATLVRGGAIPGSP

SEQ ID NO: 513 - protein, 29 aa, Artificial Sequence
  Description of Artificial Sequence: Synthetic peptide
GTAEAASASGGTPGGAAGLVRGGGAPGSP

SEQ ID NO: 514 - protein, 29 aa, Artificial Sequence
  Description of Artificial Sequence: Synthetic peptide
GTAEAASASGGASGGAADLVRGGEIPGSP

SEQ ID NO: 515 - protein, 29 aa, Artificial Sequence
  Description of Artificial Sequence: Synthetic peptide
GTAEAASASGGGTGGAGNLVRGGPAPGSP

SEQ ID NO: 516 - protein, 29 aa, Artificial Sequence
  Description of Artificial Sequence: Synthetic peptide
GTAEAASASGGEAGGAPNLVRGGSIPGSP

SEQ ID NO: 517 - protein, 29 aa, Artificial Sequence
  Description of Artificial Sequence: Synthetic peptide
GTAEAASASGGPGGGAVNLVRGGTAPGSP

SEQ ID NO: 518 - protein, 29 aa, Artificial Sequence
  Description of Artificial Sequence: Synthetic peptide
GTAEAASASGGSEGGALNLVRGGAIPGSP

SEQ ID NO: 519 - protein, 29 aa, Artificial Sequence
  Description of Artificial Sequence: Synthetic peptide
GTAEAASASGGTPGGASNLVRGGGAPGSP

SEQ ID NO: 520 - protein, 29 aa, Artificial Sequence
  Description of Artificial Sequence: Synthetic peptide
GTAEAASASGGASGGATNLVRGGEIPGSP

SEQ ID NO: 521 - protein, 29 aa, Artificial Sequence
  Description of Artificial Sequence: Synthetic peptide
GTAEAASASGGGTGGAQNLVRGGPAPGSP

SEQ ID NO: 522 - protein, 29 aa, Artificial Sequence
  Description of Artificial Sequence: Synthetic peptide
GTAEAASASGGEAGGAENLVRGGSIPGSP

SEQ ID NO: 523 - protein, 30 aa, Artificial Sequence
  Description of Artificial Sequence: Synthetic polypeptide
GTAEAASASGEAGRSANHEPLGLVATPGSP

SEQ ID NO: 524 - protein, 30 aa, Artificial Sequence
  Description of Artificial Sequence: Synthetic polypeptide
GTAEAASASGASGRSTNAGPSGLAGPPGSP

SEQ ID NO: 525 - protein, 30 aa, Artificial Sequence
  Description of Artificial Sequence: Synthetic polypeptide
GTAEAASASGASGRSTNAGPQGLAGQPGSP

SEQ ID NO: 526 - protein, 30 aa, Artificial Sequence
  Description of Artificial Sequence: Synthetic polypeptide
GTAEAASASGASGRSTNAGPPGLTGPPGSP

SEQ ID NO: 527 - protein, 30 aa, Artificial Sequence
  Description of Artificial Sequence: Synthetic polypeptide
GTAEAASASGASSRGTNAGPAGLTGPPGSP

SEQ ID NO: 528 - protein, 30 aa, Artificial Sequence
  Description of Artificial Sequence: Synthetic polypeptide
GTAEAASASGASSRTTNTGPSTLTGPPGSP

SEQ ID NO: 529 - protein, 30 aa, Artificial Sequence
  Description of Artificial Sequence: Synthetic polypeptide
GTAEAASASGAAGRSDNGTPLELVAPPGSP

SEQ ID NO: 530 - protein, 30 aa, Artificial Sequence
  Description of Artificial Sequence: Synthetic polypeptide
GTAEAASASGASGRGTNAGPAGLTGPPGSP

SEQ ID NO: 531 - protein, 30 aa, Artificial Sequence
  Description of Artificial Sequence: Synthetic polypeptide
GTAEAASASGLFGRNDNHEPLELGGGPGSP

SEQ ID NO: 532 - protein, 30 aa, Artificial Sequence
  Description of Artificial Sequence: Synthetic polypeptide
GTAEAASASGTAGRSDNLEPLGLVFGPGSP

SEQ ID NO: 533 - protein, 30 aa, Artificial Sequence
  Description of Artificial Sequence: Synthetic polypeptide
GTAEAASASGLDGRSDNFHPPELVAGPGSP

SEQ ID NO: 534 - protein, 30 aa, Artificial Sequence
  Description of Artificial Sequence: Synthetic polypeptide
GTAEAASASGLEGRSDNEEPENLVAGPGSP

SEQ ID NO: 535 - protein, 30 aa, Artificial Sequence
  Description of Artificial Sequence: Synthetic polypeptide
GTAEAASASGLKGRSDNNAPLALVAGPGSP

SEQ ID NO: 536 - protein, 30 aa, Artificial Sequence
  Description of Artificial Sequence: Synthetic polypeptide
GTAEAASASGVYSRGTNAGPHGLTGRPGSP

SEQ ID NO: 537 - protein, 30 aa, Artificial Sequence
  Description of Artificial Sequence: Synthetic polypeptide
GTAEAASASGANSRGTNKGFAGLIGPPGSP

SEQ ID NO: 538 - protein, 30 aa, Artificial Sequence
  Description of Artificial Sequence: Synthetic polypeptide
GTAEAASASGASSRLTNEAPAGLTIPPGSP

SEQ ID NO: 539 - protein, 30 aa, Artificial Sequence
  Description of Artificial Sequence: Synthetic polypeptide
GTAEAASASGDQSRGTNAGPEGLTDPPGSP

SEQ ID NO: 540 - protein, 30 aa, Artificial Sequence
  Description of Artificial Sequence: Synthetic polypeptide
GTAEAASASGESSRGTNIGQGGLTGPPGSP

SEQ ID NO: 541 - protein, 30 aa, Artificial Sequence
  Description of Artificial Sequence: Synthetic polypeptide
GTAEAASASGSSSRGTNQDPAGLTIPPGSP

SEQ ID NO: 542 - protein, 30 aa, Artificial Sequence
  Description of Artificial Sequence: Synthetic polypeptide
GTAEAASASGASSRGQNHSPMGLTGPPGSP

SEQ ID NO: 543 - protein, 30 aa, Artificial Sequence
  Description of Artificial Sequence: Synthetic polypeptide
GTAEAASASGAYSRGPNAGPAGLEGRPGSP

SEQ ID NO: 544 - protein, 30 aa, Artificial Sequence
  Description of Artificial Sequence: Synthetic polypeptide
GTAEAASASGASERGNNAGPANLTGFPGSP

SEQ ID NO: 545 - protein, 30 aa, Artificial Sequence
  Description of Artificial Sequence: Synthetic polypeptide
GTAEAASASGASHRGTNPKPAILTGPPGSP

SEQ ID NO: 546 - protein, 30 aa, Artificial Sequence
  Description of Artificial Sequence: Synthetic polypeptide
GTAEAASASGMSSRRTNANPAQLTGPPGSP

SEQ ID NO: 547 - protein, 30 aa, Artificial Sequence
  Description of Artificial Sequence: Synthetic polypeptide
GTAEAASASGGAGRTDNHEPLELGAAPGSP

SEQ ID NO: 548 - protein, 30 aa, Artificial Sequence
  Description of Artificial Sequence: Synthetic polypeptide
GTAEAASASGLAGRSENTAPLELTAGPGSP

SEQ ID NO: 549 - protein, 30 aa, Artificial Sequence
  Description of Artificial Sequence: Synthetic polypeptide
GTAEAASASGLEGRPDNHEPLALVASPGSP

SEQ ID NO: 550 - protein, 30 aa, Artificial Sequence
  Description of Artificial Sequence: Synthetic polypeptide
GTAEAASASGLSGRSDNEEPLALPAGPGSP

SEQ ID NO: 551 - protein, 30 aa, Artificial Sequence
  Description of Artificial Sequence: Synthetic polypeptide
GTAEAASASGEAGRTDNHEPLELSAPPGSP

SEQ ID NO: 552 - protein, 30 aa, Artificial Sequence
  Description of Artificial Sequence: Synthetic polypeptide
GTAEAASASGEGGRSDNHGPLELVSGPGSP

SEQ ID NO: 553 - protein, 30 aa, Artificial Sequence
  Description of Artificial Sequence: Synthetic polypeptide
GTAEAASASGLSGRSDNEAPLELEAGPGSP

SEQ ID NO: 554 - protein, 30 aa, Artificial Sequence
  Description of Artificial Sequence: Synthetic polypeptide
GTAEAASASGLGGRADNHEPPELGAGPGSP

SEQ ID NO: 555 - protein, 30 aa, Artificial Sequence
  Description of Artificial Sequence: Synthetic polypeptide
GTAEAASASGPPSRGTNAEPAGLTGEPGSP

SEQ ID NO: 556 - protein, 30 aa, Artificial Sequence
  Description of Artificial Sequence: Synthetic polypeptide
GTAEAASASGASTRGENAGPAGLEAPPGSP

SEQ ID NO: 557 - protein, 30 aa, Artificial Sequence
  Description of Artificial Sequence: Synthetic polypeptide
GTAEAASASGESSRGTNGAPEGLTGPPGSP

SEQ ID NO: 558 - protein, 30 aa, Artificial Sequence
  Description of Artificial Sequence: Synthetic polypeptide
GTAEAASASGASSRATNESPAGLTGEPGSP

SEQ ID NO: 559 - protein, 30 aa, Artificial Sequence
  Description of Artificial Sequence: Synthetic polypeptide
GTAEAASASGASSRGENPPPGGLTGPPGSP

SEQ ID NO: 560 - protein, 30 aa, Artificial Sequence
  Description of Artificial Sequence: Synthetic polypeptide
GTAEAASASGAASRGTNTGPAELTGSPGSP

SEQ ID NO: 561 - protein, 30 aa, Artificial Sequence
  Description of Artificial Sequence: Synthetic polypeptide
GTAEAASASGAGSRTTNAGPGGLEGPPGSP

SEQ ID NO: 562 - protein, 30 aa, Artificial Sequence
  Description of Artificial Sequence: Synthetic polypeptide
GTAEAASASGAPSRGENAGPATLTGAPGSP

SEQ ID NO: 563 - protein, 30 aa, Artificial Sequence
  Description of Artificial Sequence: Synthetic polypeptide
GTAEAASASGESGRAANTGPPTLTAPPGSP

SEQ ID NO: 564 - protein, 30 aa, Artificial Sequence
  Description of Artificial Sequence: Synthetic polypeptide
GTAEAASASGNPGRAANEGPPGLPGSPGSP

SEQ ID NO: 565 - protein, 30 aa, Artificial Sequence
  Description of Artificial Sequence: Synthetic polypeptide
GTAEAASASGESSRAANLTPPELTGPPGSP

SEQ ID NO: 566 - protein, 30 aa, Artificial Sequence
  Description of Artificial Sequence: Synthetic polypeptide
GTAEAASASGASGRAANETPPGLTGAPGSP

SEQ ID NO: 567 - protein, 30 aa, Artificial Sequence
  Description of Artificial Sequence: Synthetic polypeptide
GTAEAASASGNSGRGENLGAPGLTGTPGSP

SEQ ID NO: 568 - protein, 30 aa, Artificial Sequence
  Description of Artificial Sequence: Synthetic polypeptide
GTAEAASASGTTGRAANLTPAGLTGPPGSP

SEQ ID NO: 569 - protein, 30 aa, Artificial Sequence
  Description of Artificial Sequence: Synthetic polypeptide
GTAEAASASGEAGRSANHTPAGLTGPPGSP

SEQ ID NO: 570 - protein, 30 aa, Artificial Sequence
  Description of Artificial Sequence: Synthetic polypeptide
GTAEAASASGESGRAANTTPAGLTGPPGSP

SEQ ID NO: 571 - protein, 33 aa, Artificial Sequence
  Description of Artificial Sequence: Synthetic polypeptide
GTAEAASASGTTGRATEAANLTPAGLTGPPGSP

SEQ ID NO: 572 - protein, 33 aa, Artificial Sequence
  Description of Artificial Sequence: Synthetic polypeptide
GTAEAASASGTTGRAEEAANLTPAGLTGPPGSP

SEQ ID NO: 573 - protein, 33 aa, Artificial Sequence
  Description of Artificial Sequence: Synthetic polypeptide
GTAEAASASGTTGRAGEAANLTPAGLTGPPGSP

SEQ ID NO: 574 - protein, 33 aa, Artificial Sequence
  Description of Artificial Sequence: Synthetic polypeptide
GTAEAASASGTTGRATEAANATPAGLTGPPGSP

SEQ ID NO: 575 - protein, 33 aa, Artificial Sequence
  Description of Artificial Sequence: Synthetic polypeptide
GTAEAASASGTTGRAGEAEGATSAGATGPPGSP

SEQ ID NO: 576 - protein, 33 aa, Artificial Sequence
  Description of Artificial Sequence: Synthetic polypeptide
GTAEAASASGTTGEAGEAANATSAGATGPPGSP

SEQ ID NO: 577 - protein, 33 aa, Artificial Sequence
  Description of Artificial Sequence: Synthetic polypeptide
GTAEAASASGTTGEAGEAAGLTPAGLTGPPGSP

SEQ ID NO: 578 - protein, 33 aa, Artificial Sequence
  Description of Artificial Sequence: Synthetic polypeptide
GTAEAASASGTTGAAGEAANATPAGLTGPPGSP

SEQ ID NO: 579 - protein, 33 aa, Artificial Sequence
  Description of Artificial Sequence: Synthetic polypeptide
GTAEAASASGTTGRAGEAAGLTPAGLTGPPGSP

SEQ ID NO: 580 - protein, 33 aa, Artificial Sequence
  Description of Artificial Sequence: Synthetic polypeptide
GTAEAASASGTTGRAGEAANATSAGATGPPGSP

SEQ ID NO: 581 - protein, 33 aa, Artificial Sequence
  Description of Artificial Sequence: Synthetic polypeptide
GTAEAASASGTTGEAGEAAGATSAGATGPPGSP

SEQ ID NO: 582 - protein, 30 aa, Artificial Sequence
  Description of Artificial Sequence: Synthetic polypeptide
GTAEAASASGESGRAANTEPPELGAGPGSP

SEQ ID NO: 583 - protein, 30 aa, Artificial Sequence
  Description of Artificial Sequence: Synthetic polypeptide
GTAEAASASGESGRAANTAPEGLTGPPGSP

SEQ ID NO: 584 - protein, 30 aa, Artificial Sequence
  Description of Artificial Sequence: Synthetic polypeptide
GTAEAASASGEPGRAANHEPSGLTEGPGSP

SEQ ID NO: 585 - protein, 33 aa, Artificial Sequence
  Description of Artificial Sequence: Synthetic polypeptide
GTAEAASASGESGRAANHTGAPPGGLTGPPGSP

SEQ ID NO: 586 - protein, 33 aa, Artificial Sequence
  Description of Artificial Sequence: Synthetic polypeptide
GTAEAASASGTTGRTGEGANATPGGLTGPPGSP

SEQ ID NO: 587 - protein, 33 aa, Artificial Sequence
  Description of Artificial Sequence: Synthetic polypeptide
GTAEAASASGRTGRSGEAANETPEGLEGPPGSP

SEQ ID NO: 588 - protein, 33 aa, Artificial Sequence
  Description of Artificial Sequence: Synthetic polypeptide
GTAEAASASGRTGRTGESANETPAGLGGPPGSP

SEQ ID NO: 589 - protein, 33 aa, Artificial Sequence
  Description of Artificial Sequence: Synthetic polypeptide
GTAEAASASGSTGRTGEPANETPAGLSGPPGSP

SEQ ID NO: 590 - protein, 33 aa, Artificial Sequence
  Description of Artificial Sequence: Synthetic polypeptide
GTAEAASASGTTGRAGEPANATPTGLSGPPGSP

SEQ ID NO: 591 - protein, 33 aa, Artificial Sequence
  Description of Artificial Sequence: Synthetic polypeptide
GTAEAASASGRTGRPGEGANATPTGLPGPPGSP

SEQ ID NO: 592 - protein, 33 aa, Artificial Sequence
  Description of Artificial Sequence: Synthetic polypeptide
GTAEAASASGRTGRGGEAANATPSGLGGPPGSP

SEQ ID NO: 593 - protein, 33 aa, Artificial Sequence
  Description of Artificial Sequence: Synthetic polypeptide
GTAEAASASGSTGRSGESANATPGGLGGPPGSP

SEQ ID NO: 594 - protein, 33 aa, Artificial Sequence
  Description of Artificial Sequence: Synthetic polypeptide
GTAEAASASGRTGRTGEEANATPAGLPGPPGSP

SEQ ID NO: 595 - protein, 33 aa, Artificial Sequence
  Description of Artificial Sequence: Synthetic polypeptide
GTAEAASASGATGRPGEPANTTPEGLEGPPGSP

SEQ ID NO: 596 - protein, 33 aa, Artificial Sequence
  Description of Artificial Sequence: Synthetic polypeptide
GTAEAASASGSTGRSGEPANATPGGLTGPPGSP

SEQ ID NO: 597 - protein, 33 aa, Artificial Sequence
  Description of Artificial Sequence: Synthetic polypeptide
GTAEAASASGPTGRGGEGANTTPTGLPGPPGSP

SEQ ID NO: 598 - protein, 33 aa, Artificial Sequence
  Description of Artificial Sequence: Synthetic polypeptide
GTAEAASASGPTGRSGEGANATPSGLTGPPGSP

SEQ ID NO: 599 - protein, 33 aa, Artificial Sequence
  Description of Artificial Sequence: Synthetic polypeptide
GTAEAASASGTTGRASEGANSTPAPLTEPPGSP

SEQ ID NO: 600 - protein, 33 aa, Artificial Sequence
  Description of Artificial Sequence: Synthetic polypeptide
GTAEAASASGTYGRAAEAANTTPAGLTAPPGSP

SEQ ID NO: 601 - protein, 33 aa, Artificial Sequence
  Description of Artificial Sequence: Synthetic polypeptide
GTAEAASASGTTGRATEGANATPAELTEPPGSP

SEQ ID NO: 602 - protein, 33 aa, Artificial Sequence
  Description of Artificial Sequence: Synthetic polypeptide
GTAEAASASGTVGRASEEANTTPASLTGPPGSP

SEQ ID NO: 603 - protein, 33 aa, Artificial Sequence
  Description of Artificial Sequence: Synthetic polypeptide
GTAEAASASGTTGRAPEAANATPAPLTGPPGSP

SEQ ID NO: 604 - protein, 33 aa, Artificial Sequence
  Description of Artificial Sequence: Synthetic polypeptide
GTAEAASASGTWGRATEPANATPAPLTSPPGSP

SEQ ID NO: 605 - protein, 33 aa, Artificial Sequence
  Description of Artificial Sequence: Synthetic polypeptide
GTAEAASASGTVGRASESANATPAELTSPPGSP

SEQ ID NO: 606 - protein, 33 aa, Artificial Sequence
  Description of Artificial Sequence: Synthetic polypeptide
GTAEAASASGTVGRAPEGANSTPAGLTGPPGSP

SEQ ID NO: 607 - protein, 33 aa, Artificial Sequence
  Description of Artificial Sequence: Synthetic polypeptide
GTAEAASASGTWGRATEAPNLEPATLTTPPGSP

SEQ ID NO: 608 - protein, 33 aa, Artificial Sequence
  Description of Artificial Sequence: Synthetic polypeptide
GTAEAASASGTTGRATEAPNLTPAPLTEPPGSP

SEQ ID NO: 609 - protein, 33 aa, Artificial Sequence
  Description of Artificial Sequence: Synthetic polypeptide
GTAEAASASGTQGRATEAPNLSPAALTSPPGSP

SEQ ID NO: 610 - protein, 33 aa, Artificial Sequence
  Description of Artificial Sequence: Synthetic polypeptide
GTAEAASASGTQGRAAEAPNLTPATLTAPPGSP

SEQ ID NO: 611 - protein, 33 aa, Artificial Sequence
  Description of Artificial Sequence: Synthetic polypeptide
GTAEAASASGTSGRAPEATNLAPAPLTGPPGSP

SEQ ID NO: 612 - protein, 33 aa, Artificial Sequence
  Description of Artificial Sequence: Synthetic polypeptide
GTAEAASASGTQGRAAEAANLTPAGLTEPPGSP

SEQ ID NO: 613 - protein, 33 aa, Artificial Sequence
  Description of Artificial Sequence: Synthetic polypeptide
GTAEAASASGTTGRAGSAPNLPPTGLTTPPGSP

SEQ ID NO: 614 - protein, 33 aa, Artificial Sequence
  Description of Artificial Sequence: Synthetic polypeptide
GTAEAASASGTTGRAGGAENLPPEGLTAPPGSP

SEQ ID NO: 615 - protein, 33 aa, Artificial Sequence
  Description of Artificial Sequence: Synthetic polypeptide
GTAEAASASGTTSRAGTATNLTPEGLTAPPGSP

SEQ ID NO: 616 - protein, 33 aa, Artificial Sequence
  Description of Artificial Sequence: Synthetic polypeptide
GTAEAASASGTTGRAGTATNLPPSGLTTPPGSP

SEQ ID NO: 617 - protein, 33 aa, Artificial Sequence
  Description of Artificial Sequence: Synthetic polypeptide
GTAEAASASGTTARAGEAENLSPSGLTAPPGSP

SEQ ID NO: 618 - protein, 33 aa, Artificial Sequence
  Description of Artificial Sequence: Synthetic polypeptide
GTAEAASASGTTGRAGGAGNLAPGGLTEPPGSP

SEQ ID NO: 619 - protein, 33 aa, Artificial Sequence
  Description of Artificial Sequence: Synthetic polypeptide
GTAEAASASGTTGRAGTATNLPPEGLTGPPGSP

SEQ ID NO: 620 - protein, 33 aa, Artificial Sequence
  Description of Artificial Sequence: Synthetic polypeptide
GTAEAASASGTTGRAGGAANLAPTGLTEPPGSP

SEQ ID NO: 621 - protein, 33 aa, Artificial Sequence
  Description of Artificial Sequence: Synthetic polypeptide
GTAEAASASGTTGRAGTAENLAPSGLTTPPGSP

SEQ ID NO: 622 - protein, 33 aa, Artificial Sequence
  Description of Artificial Sequence: Synthetic polypeptide
GTAEAASASGTTGRAGSATNLGPGGLTGPPGSP

SEQ ID NO: 623 - protein, 33 aa, Artificial Sequence
  Description of Artificial Sequence: Synthetic polypeptide
GTAEAASASGTTARAGGAENLTPAGLTEPPGSP

SEQ ID NO: 624 - protein, 33 aa, Artificial Sequence
  Description of Artificial Sequence: Synthetic polypeptide
GTAEAASASGTTARAGSAENLSPSGLTGPPGSP

SEQ ID NO: 625 - protein, 33 aa, Artificial Sequence
  Description of Artificial Sequence: Synthetic polypeptide
GTAEAASASGTTARAGGAGNLAPEGLTTPPGSP

SEQ ID NO: 626 - protein, 33 aa, Artificial Sequence
  Description of Artificial Sequence: Synthetic polypeptide
GTAEAASASGTTSRAGAAENLTPTGLTGPPGSP

SEQ ID NO: 627 - protein, 33 aa, Artificial Sequence
  Description of Artificial Sequence: Synthetic polypeptide
GTAEAASASGTYGRTTTPGNEPPASLEAEPGSP

SEQ ID NO: 628 - protein, 33 aa, Artificial Sequence
  Description of Artificial Sequence: Synthetic polypeptide
GTAEAASASGTYSRGESGPNEPPPGLTGPPGSP

SEQ ID NO: 629 - protein, 33 aa, Artificial Sequence
  Description of Artificial Sequence: Synthetic polypeptide
GTAEAASASGAWGRTGASENETPAPLGGEPGSP

SEQ ID NO: 630 - protein, 33 aa, Artificial Sequence
  Description of Artificial Sequence: Synthetic polypeptide
GTAEAASASGRWGRAETTPNTPPEGLETEPGSP

SEQ ID NO: 631 - protein, 33 aa, Artificial Sequence
  Description of Artificial Sequence: Synthetic polypeptide
GTAEAASASGESGRAANHTGAEPPELGAGPGSP

SEQ ID NO: 632 - protein, 33 aa, Artificial Sequence
  Description of Artificial Sequence: Synthetic polypeptide
GTAEAASASGTTGRAGEAANLTPAGLTESPGSP

SEQ ID NO: 633 - protein, 33 aa, Artificial Sequence
  Description of Artificial Sequence: Synthetic polypeptide
GTAEAASASGTTGRAGEAANLTPAALTESPGSP

SEQ ID NO: 634 - protein, 33 aa, Artificial Sequence
  Description of Artificial Sequence: Synthetic polypeptide
GTAEAASASGTTGRAGEAANLTPAPLTESPGSP

SEQ ID NO: 635 - protein, 33 aa, Artificial Sequence
  Description of Artificial Sequence: Synthetic polypeptide
GTAEAASASGTTGRAGEAANLTPEPLTESPGSP

SEQ ID NO: 636 - protein, 33 aa, Artificial Sequence
  Description of Artificial Sequence: Synthetic polypeptide
GTAEAASASGTTGRAGEAANLTPAGLTGAPGSP

SEQ ID NO: 637 - protein, 33 aa, Artificial Sequence
  Description of Artificial Sequence: Synthetic polypeptide
GTAEAASASGTTGRAGEAANLTPEGLTGAPGSP

SEQ ID NO: 638 - protein, 33 aa, Artificial Sequence
  Description of Artificial Sequence: Synthetic polypeptide
GTAEAASASGTTGRAGEAANLTPEPLTGAPGSP

SEQ ID NO: 639 - protein, 33 aa, Artificial Sequence
  Description of Artificial Sequence: Synthetic polypeptide
GTAEAASASGTTGRAGEAANLTPAGLTEAPGSP

SEQ ID NO: 640 - protein, 33 aa, Artificial Sequence
  Description of Artificial Sequence: Synthetic polypeptide
GTAEAASASGTTGRAGEAANLTPEGLTEAPGSP

SEQ ID NO: 641 - protein, 33 aa, Artificial Sequence
  Description of Artificial Sequence: Synthetic polypeptide
GTAEAASASGTTGRAGEAANLTPAPLTEAPGSP

SEQ ID NO: 642 - protein, 33 aa, Artificial Sequence
  Description of Artificial Sequence: Synthetic polypeptide
GTAEAASASGTTGRAGEAANLTPEPLTEAPGSP

SEQ ID NO: 643 - protein, 33 aa, Artificial Sequence
  Description of Artificial Sequence: Synthetic polypeptide
GTAEAASASGTTGRAGEAANLTPEPLTGPPGSP

SEQ ID NO: 644 - protein, 33 aa, Artificial Sequence
  Description of Artificial Sequence: Synthetic polypeptide
GTAEAASASGTTGRAGEAANLTPAGLTGGPGSP

SEQ ID NO: 645 - protein, 33 aa, Artificial Sequence
  Description of Artificial Sequence: Synthetic polypeptide
GTAEAASASGTTGRAGEAANLTPEGLTGGPGSP

SEQ ID NO: 646 - protein, 33 aa, Artificial Sequence
  Description of Artificial Sequence: Synthetic polypeptide
GTAEAASASGTTGRAGEAANLTPEALTGGPGSP

SEQ ID NO: 647 - protein, 33 aa, Artificial Sequence
  Description of Artificial Sequence: Synthetic polypeptide
GTAEAASASGTTGRAGEAANLTPEPLTGGPGSP

SEQ ID NO: 648 - protein, 33 aa, Artificial Sequence
  Description of Artificial Sequence: Synthetic polypeptide
GTAEAASASGTTGRAGEAANLTPAGLTEGPGSP

SEQ ID NO: 649 - protein, 33 aa, Artificial Sequence
  Description of Artificial Sequence: Synthetic polypeptide
GTAEAASASGTTGRAGEAANLTPEGLTEGPGSP

SEQ ID NO: 650 - protein, 33 aa, Artificial Sequence
  Description of Artificial Sequence: Synthetic polypeptide
GTAEAASASGTTGRAGEAANLTPAPLTEGPGSP

SEQ ID NO: 651 - protein, 33 aa, Artificial Sequence
  Description of Artificial Sequence: Synthetic polypeptide
GTAEAASASGTTGRAGEAANLTPEPLTEGPGSP

SEQ ID NO: 652 - protein, 30 aa, Artificial Sequence
  Description of Artificial Sequence: Synthetic polypeptide
GTAEAASASGEAGRSAEATSAGATGPPGSP

SEQ ID NO: 653 - protein, 30 aa, Artificial Sequence
  Description of Artificial Sequence: Synthetic polypeptide
GTAEAASASGSASGTYSRGESGPGSPPGSP

SEQ ID NO: 654 - protein, 30 aa, Artificial Sequence
  Description of Artificial Sequence: Synthetic polypeptide
GTAEAASASGSASGEAGRTDTHPGSPPGSP

SEQ ID NO: 655 - protein, 30 aa, Artificial Sequence
  Description of Artificial Sequence: Synthetic polypeptide
GTAEAASASGSASGEPGRAAEHPGSPPGSP

SEQ ID NO: 656 - protein, 30 aa, Artificial Sequence
  Description of Artificial Sequence: Synthetic polypeptide
GTAEAASASGSPAGESSRGTTIAGSPPGSP

SEQ ID NO: 657 - protein, 30 aa, Artificial Sequence
  Description of Artificial Sequence: Synthetic polypeptide
GTAEAASASGEAGESAGATPAGLTGPPGSP

SEQ ID NO: 658 - protein, 30 aa, Artificial Sequence
  Description of Artificial Sequence: Synthetic polypeptide
GTAEAASASGSASGAPLELEAGPGSPPGSP

SEQ ID NO: 659 - protein, 30 aa, Artificial Sequence
  Description of Artificial Sequence: Synthetic polypeptide
GTAEAASASGSASGEPPELGAGPGSPPGSP

SEQ ID NO: 660 - protein, 30 aa, Artificial Sequence
  Description of Artificial Sequence: Synthetic polypeptide
GTAEAASASGSASGEPSGLTEGPGSPPGSP

SEQ ID NO: 661 - protein, 30 aa, Artificial Sequence
  Description of Artificial Sequence: Synthetic polypeptide
GTAEAASASGSASGTPAPLTEPPGSPPGSP

SEQ ID NO: 662 - protein, 30 aa, Artificial Sequence
  Description of Artificial Sequence: Synthetic polypeptide
GTAEAASASGSASGTPAELTEPPGSPPGSP

SEQ ID NO: 663 - protein, 30 aa, Artificial Sequence
  Description of Artificial Sequence: Synthetic polypeptide
GTAEAASASGSASGPPPGLTGPPGSPPGSP

SEQ ID NO: 664 - protein, 30 aa, Artificial Sequence
  Description of Artificial Sequence: Synthetic polypeptide
GTAEAASASGSASGTPAPLGGEPGSPPGSP

SEQ ID NO: 665 - protein, 30 aa, Artificial Sequence
  Description of Artificial Sequence: Synthetic polypeptide
GTAEAASASGSPAGAPEGLTGPAGSPPGSP

SEQ ID NO: 666 - protein, 30 aa, Artificial Sequence
  Description of Artificial Sequence: Synthetic polypeptide
GTAEAASASGSPAGPPEGLETEAGSPPGSP

SEQ ID NO: 667 - protein, 30 aa, Artificial Sequence
  Description of Artificial Sequence: Synthetic polypeptide
GTAEAASASGSPTSGQGGLTGPGSEPPGSP

SEQ ID NO: 668 - protein, 30 aa, Artificial Sequence
  Description of Artificial Sequence: Synthetic polypeptide
GTAEAASASGSESAPPEGLETESTEPPGSP

SEQ ID NO: 669 - protein, 30 aa, Artificial Sequence
  Description of Artificial Sequence: Synthetic polypeptide
GTAEAASASGSEGSEPLELGAASETPPGSP

SEQ ID NO: 670 - protein, 30 aa, Artificial Sequence
  Description of Artificial Sequence: Synthetic polypeptide
GTAEAASASGSEGSGPAGLEAPSETPPGSP

SEQ ID NO: 671 - protein, 30 aa, Artificial Sequence
  Description of Artificial Sequence: Synthetic polypeptide
GTAEAASASGSEPTPPASLEAEPGSPPGSP

SEQ ID NO: 672 - protein, 12 aa, Artificial Sequence
  Description of Artificial Sequence: Synthetic peptide
GSPAGSPTSTEE

SEQ ID NO: 673 - protein, 12 aa, Artificial Sequence
  Description of Artificial Sequence: Synthetic peptide
GSEPATSGSETP

SEQ ID NO: 674 - protein, 12 aa, Artificial Sequence
  Description of Artificial Sequence: Synthetic peptide
GTSESATPESGP

SEQ ID NO: 675 - protein, 12 aa, Artificial Sequence
  Description of Artificial Sequence: Synthetic peptide
GTSTEPSEGSAP

SEQ ID NO: 676 - protein, 144 aa, Artificial Sequence
  Description of Artificial Sequence: Synthetic polypeptide
GSEPATSGSETPGTSESATPESGPGSEPATSGSETPGSPAGSPTSTEEGTSTEPSEGSAPGSEPATSGSETPGSEPATSGSETPGSEPATSGSETPGTSTEPSEGSAPGTSESATPESGPGSEPATSGSETPGTSTEPSEGSAP

SEQ ID NO: 677 - protein, 144 aa, Artificial Sequence
  Description of Artificial Sequence: Synthetic polypeptide
SPAGSPTSTEEGTSESATPESGPGTSTEPSEGSAPGSPAGSPTSTEEGTSTEPSEGSAPGTSTEPSEGSAPGTSESATPESGPGSEPATSGSETPGSEPATSGSETPGSPAGSPTSTEEGTSESATPESGPGTSTEPSEGSAPG

SEQ ID NO: 678 - protein, 144 aa, Artificial Sequence
  Description of Artificial Sequence: Synthetic polypeptide
TSTEPSEGSAPGSPAGSPTSTEEGTSTEPSEGSAPGTSTEPSEGSAPGTSESATPESGPGTSTEPSEGSAPGTSESATPESGPGSEPATSGSETPGTSTEPSEGSAPGTSTEPSEGSAPGTSESATPESGPGTSESATPESGPG

SEQ ID NO: 679 - protein, 144 aa, Artificial Sequence; identical to SEQ ID NO: 678
  Description of Artificial Sequence: Synthetic polypeptide

SEQ ID NO: 680 - protein, 144 aa, Artificial Sequence
  Description of Artificial Sequence: Synthetic polypeptide
SPAGSPTSTEEGTSESATPESGPGSEPATSGSETPGTSESATPESGPGTSTEPSEGSAPGTSTEPSEGSAPGTSTEPSEGSAPGTSTEPSEGSAPGTSTEPSEGSAPGTSTEPSEGSAPGSPAGSPTSTEEGTSTEPSEGSAPG

SEQ ID NO: 681 - protein, 144 aa, Artificial Sequence; identical to SEQ ID NO: 680
  Description of Artificial Sequence: Synthetic polypeptide

SEQ ID NO: 682 - protein, 144 aa, Artificial Sequence
  Description of Artificial Sequence: Synthetic polypeptide
TSESATPESGPGSEPATSGSETPGTSESATPESGPGSEPATSGSETPGTSESATPESGPGTSTEPSEGSAPGTSESATPESGPGSPAGSPTSTEEGSPAGSPTSTEEGSPAGSPTSTEEGTSESATPESGPGTSTEPSEGSAPG

SEQ ID NO: 683 - protein, 144 aa, Artificial Sequence; identical to SEQ ID NO: 682
  Description of Artificial Sequence: Synthetic polypeptide

SEQ ID NO: 684 - protein, 144 aa, Artificial Sequence
  Description of Artificial Sequence: Synthetic polypeptide
TSESATPESGPGSEPATSGSETPGTSESATPESGPGSEPATSGSETPGTSESATPESGPGTSTEPSEGSAPGSPAGSPTSTEEGTSESATPESGPGSEPATSGSETPGTSESATPESGPGSPAGSPTSTEEGSPAGSPTSTEEG

SEQ ID NO: 685 - protein, 144 aa, Artificial Sequence
  Description of Artificial Sequence: Synthetic polypeptide
TSTEPSEGSAPGTSESATPESGPGTSESATPESGPGTSESATPESGPGSEPATSGSETPGSEPATSGSETPGSPAGSPTSTEEGTSTEPSEGSAPGTSTEPSEGSAPGSEPATSGSETPGTSESATPESGPGTSTEPSEGSAPG

SEQ ID NO: 686 - protein, 288 aa, Artificial Sequence
  Description of Artificial Sequence: Synthetic polypeptide
GTSESATPESGPGSEPATSGSETPGTSESATPESGPGSEPATSGSETPGTSESATPESGPGTSTEPSEGSAPGSPAGSPTSTEEGTSESATPESGPGSEPATSGSETPGTSESATPESGPGSPAGSPTSTEEGSPAGSPTSTEEGTSTEPSEGSAPGTSESATPESGPGTSESATPESGPGTSESATPESGPGSEPATSGSETPGSEPATSGSETPGSPAGSPTSTEEGTSTEPSEGSAPGTSTEPSEGSAPGSEPATSGSETPGTSESATPESGPGTSTEPSEGSAP

SEQ ID NO: 687 - protein, 288 aa, Artificial Sequence
  Description of Artificial Sequence: Synthetic polypeptide
GSPAGSPTSTEEGTSESATPESGPGSEPATSGSETPGTSESATPESGPGTSTEPSEGSAPGTSTEPSEGSAPGTSTEPSEGSAPGTSTEPSEGSAPGTSTEPSEGSAPGTSTEPSEGSAPGSPAGSPTSTEEGTSTEPSEGSAPGTSESATPESGPGSEPATSGSETPGTSESATPESGPGSEPATSGSETPGTSESATPESGPGTSTEPSEGSAPGTSESATPESGPGSPAGSPTSTEEGSPAGSPTSTEEGSPAGSPTSTEEGTSESATPESGPGTSTEPSEGSAP

SEQ ID NO: 688 - protein, 576 aa, Artificial Sequence
  Description of Artificial Sequence: Synthetic polypeptide
GSPAGSPTSTEEGTSESATPESGPGTSTEPSEGSAPGSPAGSPTSTEEGTSTEPSEGSAPGTSTEPSEGSAPGTSESATPESGPGSEPATSGSETPGSEPATSGSETPGSPAGSPTSTEEGTSESATPESGPGTSTEPSEGSAPGTSTEPSEGSAPGSPAGSPTSTEEGTSTEPSEGSAPGTSTEPSEGSAPGTSESATPESGPGTSTEPSEGSAPGTSESATPESGPGSEPATSGSETPGTSTEPSEGSAPGTSTEPSEGSAPGTSESATPESGPGTSESATPESGPGSPAGSPTSTEEGTSESATPESGPGSEPATSGSETPGTSESATPESGPGTSTEPSEGSAPGTSTEPSEGSAPGTSTEPSEGSAPGTSTEPSEGSAPGTSTEPSEGSAPGTSTEPSEGSAPGSPAGSPTSTEEGTSTEPSEGSAPGTSESATPESGPGSEPATSGSETPGTSESATPESGPGSEPATSGSETPGTSESATPESGPGTSTEPSEGSAPGTSESATPESGPGSPAGSPTSTEEGSPAGSPTSTEEGSPAGSPTSTEEGTSESATPESGPGTSTEPSEGSAP

SEQ ID NO: 689 - protein, 625 aa, Artificial Sequence
  Description of Artificial Sequence: Synthetic polypeptide
MAEPAGSPTSTEEGTPGSGTASSSPGSSTPSGATGSPGASPGTSSTGSPGSPAGSPTSTEEGTSESATPESGPGTSTEPSEGSAPGSPAGSPTSTEEGTSTEPSEGSAPGTSTEPSEGSAPGTSESATPESGPGSEPATSGSETPGSEPATSGSETPGSPAGSPTSTEEGTSESATPESGPGTSTEPSEGSAPGTSTEPSEGSAPGSPAGSPTSTEEGTSTEPSEGSAPGTSTEPSEGSAPGTSESATPESGPGTSTEPSEGSAPGTSESATPESGPGSEPATSGSETPGTSTEPSEGSAPGTSTEPSEGSAPGTSESATPESGPGTSESATPESGPGSPAGSPTSTEEGTSESATPESGPGSEPATSGSETPGTSESATPESGPGTSTEPSEGSAPGTSTEPSEGSAPGTSTEPSEGSAPGTSTEPSEGSAPGTSTEPSEGSAPGTSTEPSEGSAPGSPAGSPTSTEEGTSTEPSEGSAPGTSESATPESGPGSEPATSGSETPGTSESATPESGPGSEPATSGSETPGTSESATPESGPGTSTEPSEGSAPGTSESATPESGPGSPAGSPTSTEEGSPAGSPTSTEEGSPAGSPTSTEEGTSESATPESGPGTSTEPSEGSAP

SEQ ID NO: 690 - protein, 864 aa, Artificial Sequence
  Description of Artificial Sequence: Synthetic polypeptide
GSPAGSPTSTEEGTSESATPESGPGTSTEPSEGSAPGSPAGSPTSTEEGTSTEPSEGSAPGTSTEPSEGSAPGTSESATPESGPGSEPATSGSETPGSEPATSGSETPGSPAGSPTSTEEGTSESATPESGPGTSTEPSEGSAPGTSTEPSEGSAPGSPAGSPTSTEEGTSTEPSEGSAPGTSTEPSEGSAPGTSESATPESGPGTSTEPSEGSAPGTSESATPESGPGSEPATSGSETPGTSTEPSEGSAPGTSTEPSEGSAPGTSESATPESGPGTSESATPESGPGSPAGSPTSTEEGTSESATPESGPGSEPATSGSETPGTSESATPESGPGTSTEPSEGSAPGTSTEPSEGSAPGTSTEPSEGSAPGTSTEPSEGSAPGTSTEPSEGSAPGTSTEPSEGSAPGSPAGSPTSTEEGTSTEPSEGSAPGTSESATPESGPGSEPATSGSETPGTSESATPESGPGSEPATSGSETPGTSESATPESGPGTSTEPSEGSAPGTSESATPESGPGSPAGSPTSTEEGSPAGSPTSTEEGSPAGSPTSTEEGTSESATPESGPGTSTEPSEGSAPGTSESATPESGPGSEPATSGSETPGTSESATPESGPGSEPATSGSETPGTSESATPESGPGTSTEPSEGSAPGSPAGSPTSTEEGTSESATPESGPGSEPATSGSETPGTSESATPESGPGSPAGSPTSTEEGSPAGSPTSTEEGTSTEPSEGSAPGTSESATPESGPGTSESATPESGPGTSESATPESGPGSEPATSGSETPGSEPATSGSETPGSPAGSPTSTEEGTSTEPSEGSAPGTSTEPSEGSAPGSEPATSGSETPGTSESATPESGPGTSTEPSEGSAP

SEQ ID NO: 691 - protein, 865 aa, Artificial Sequence
  Description of Artificial Sequence: Synthetic polypeptide
GGSPAGSPTSTEEGTSESATPESGPGTSTEPSEGSAPGSPAGSPTSTEEGTSTEPSEGSAPGTSTEPSEGSAPGTSESATPESGPGSEPATSGSETPGSEPATSGSETPGSPAGSPTSTEEGTSESATPESGPGTSTEPSEGSAPGTSTEPSEGSAPGSPAGSPTSTEEGTSTEPSEGSAPGTSTEPSEGSAPGTSESATPESGPGTSTEPSEGSAPGTSESATPESGPGSEPATSGSETPGTSTEPSEGSAPGTSTEPSEGSAPGTSESATPESGPGTSESATPESGPGSPAGSPTSTEEGTSESATPESGPGSEPATSGSETPGTSESATPESGPGTSTEPSEGSAPGTSTEPSEGSAPGTSTEPSEGSAPGTSTEPSEGSAPGTSTEPSEGSAPGTSTEPSEGSAPGSPAGSPTSTEEGTSTEPSEGSAPGTSESATPESGPGSEPATSGSETPGTSESATPESGPGSEPATSGSETPGTSESATPESGPGTSTEPSEGSAPGTSESATPESGPGSPAGSPTSTEEGSPAGSPTSTEEGSPAGSPTSTEEGTSESATPESGPGTSTEPSEGSAPGTSESATPESGPGSEPATSGSETPGTSESATPESGPGSEPATSGSETPGTSESATPESGPGTSTEPSEGSAPGSPAGSPTSTEEGTSESATPESGPGSEPATSGSETPGTSESATPESGPGSPAGSPTSTEEGSPAGSPTSTEEGTSTEPSEGSAPGTSESATPESGPGTSESATPESGPGTSESATPESGPGSEPATSGSETPGSEPATSGSETPGSPAGSPTSTEEGTSTEPSEGSAPGTSTEPSEGSAPGSEPATSGSETPGTSESATPESGPGTSTEPSEGSAP

SEQ ID NO: 692 - protein, 866 aa, Artificial Sequence
  Description of Artificial Sequence: Synthetic polypeptide
PGSPAGSPTSTEEGTSESATPESGPGTSTEPSEGSAPGSPAGSPTSTEEGTSTEPSEGSAPGTSTEPSEGSAPGTSESATPESGPGSEPATSGSETPGSEPATSGSETPGSPAGSPTSTEEGTSESATPESGPGTSTEPSEGSAPGTSTEPSEGSAPGSPAGSPTSTEEGTSTEPSEGSAPGTSTEPSEGSAPGTSESATPESGPGTSTEPSEGSAPGTSESATPESGPGSEPATSGSETPGTSTEPSEGSAPGTSTEPSEGSAPGTSESATPESGPGTSESATPESGPGSPAGSPTSTEEGTSESATPESGPGSEPATSGSETPGTSESATPESGPGTSTEPSEGSAPGTSTEPSEGSAPGTSTEPSEGSAPGTSTEPSEGSAPGTSTEPSEGSAPGTSTEPSEGSAPGSPAGSPTSTEEGTSTEPSEGSAPGTSESATPESGPGSEPATSGSETPGTSESATPESGPGSEPATSGSETPGTSESATPESGPGTSTEPSEGSAPGTSESATPESGPGSPAGSPTSTEEGSPAGSPTSTEEGSPAGSPTSTEEGTSESATPESGPGTSTEPSEGSAPGTSESATPESGPGSEPATSGSETPGTSESATPESGPGSEPATSGSETPGTSESATPESGPGTSTEPSEGSAPGSPAGSPTSTEEGTSESATPESGPGSEPATSGSETPGTSESATPESGPGSPAGSPTSTEEGSPAGSPTSTEEGTSTEPSEGSAPGTSESATPESGPGTSESATPESGPGTSESATPESGPGSEPATSGSETPGSEPATSGSETPGSPAGSPTSTEEGTSTEPSEGSAPGTSTEPSEGSAPGSEPATSGSETPGTSESATPESGPGTSTEPSEGSAPG

SEQ ID NO: 693 - protein, 1152 aa, Artificial Sequence
  Description of Artificial Sequence: Synthetic polypeptide
GSPAGSPTSTEEGTSESATPESGPGTSTEPSEGSAPGSPAGSPTSTEEGTSTEPSEGSAPGTSTEPSEGSAPGTSESATPESGPGSEPATSGSETPGSEPATSGSETPGSPAGSPTSTEEGTSESATPESGPGTSTEPSEGSAPGTSTEPSEGSAPGSPAGSPTSTEEGTSTEPSEGSAPGTSTEPSEGSAPGTSESATPESGPGTSTEPSEGSAPGTSESATPESGPGSEPATSGSETPGTSTEPSEGSAPGTSTEPSEGSAPGTSESATPESGPGTSESATPESGPGSPAGSPTSTEEGTSESATPESGPGSEPATSGSETPGTSESATPESGPGTSTEPSEGSAPGTSTEPSEGSAPGTSTEPSEGSAPGTSTEPSEGSAPGTSTEPSEGSAPGTSTEPSEGSAPGSPAGSPTSTEEGTSTEPSEGSAPGTSESATPESGPGSEPATSGSETPGTSESATPESGPGSEPATSGSETPGTSESATPESGPGTSTEPSEGSAPGTSESATPESGPGSPAGSPTSTEEGSPAGSPTSTEEGSPAGSPTSTEEGTSESATPESGPGTSTEPSEGSAPGTSESATPESGPGSEPATSGSETPGTSESATPESGPGSEPATSGSETPGTSESATPESGPGTSTEPSEGSAPGSPAGSPTSTEEGTSESATPESGPGSEPATSGSETPGTSESATPESGPGSPAGSPTSTEEGSPAGSPTSTEEGTSTEPSEGSAPGTSESATPESGPGTSESATPESGPGTSESATPESGPGSEPATSGSETPGSEPATSGSETPGSPAGSPTSTEEGTSTEPSEGSAPGTSTEPSEGSAPGSEPATSGSETPGTSESATPESGPGTSTEPSEGSAPGTSESATPESGPGSEPATSGSETPGTSESATPESGPGSEPATSGSETPGTSESATPESGPGTSTEPSEGSAPGSPAGSPTSTEEGTSESATPESGPGSEPATSGSETPGTSESATPESGPGSPAGSPTSTEEGSPAGSPTSTEEGTSTEPSEGSAPGTSESATPESGPGTSESATPESGPGTSESATPESGPGSEPATSGSETPGSEPATSGSETPGSPAGSPTSTEEGTSTEPSEGSAPGTSTEPSEGSAPGSEPATSGSETPGTSESATPESGPGTSTEPSEGSAP

SEQ ID NO: 694 - protein, 144 aa, Artificial Sequence
  Description of Artificial Sequence: Synthetic polypeptide
STEPSEGSAPGSPAGSPTSTEEGTSTEPSEGSAPGTSESATPESGPGSEPATSGSETPGTSESATPESGPGSEPATSGSETPGTSESATPESGPGTSTEPSEGSAPGTSESATPESGPGSPAGSPTSTEEGSPAGSPTSTEEGS

SEQ ID NO: 695 - protein, 144 aa, Artificial Sequence
  Description of Artificial Sequence: Synthetic polypeptide
SEPATSGSETPGTSESATPESGPGSEPATSGSETPGTSESATPESGPGTSTEPSEGSAPGSPAGSPTSTEEGTSESATPESGPGSEPATSGSETPGTSESATPESGPGSPAGSPTSTEEGSPAGSPTSTEEGTSTEPSEGSAPG

SEQ ID NO: 696 - protein, 180 aa, Artificial Sequence
  Description of Artificial Sequence: Synthetic polypeptide
TSTEEGTSESATPESGPGSEPATSGSETPGTSESATPESGPGSPAGSPTSTEEGSPAGSPTSTEEGTSTEPSEGSAPGTSESATPESGPGTSESATPESGPGTSESATPESGPGSEPATSGSETPGSEPATSGSETPGSPAGSPTSTEEGTSTEPSEGSAPGTSTEPSEGSAPGSEPATS

SEQ ID NO: 697 - protein, 216 aa, Artificial Sequence
  Description of Artificial Sequence: Synthetic polypeptide
PESGPGTSTEPSEGSAPGSPAGSPTSTEEGTSESATPESGPGSEPATSGSETPGTSESATPESGPGSPAGSPTSTEEGSPAGSPTSTEEGTSTEPSEGSAPGTSESATPESGPGTSESATPESGPGTSESATPESGPGSEPATSGSETPGSEPATSGSETPGSPAGSPTSTEEGTSTEPSEGSAPGTSTEPSEGSAPGSEPATSGSETPGTSESAT

SEQ ID NO: 698 - protein, 252 aa, Artificial Sequence
  Description of Artificial Sequence: Synthetic polypeptide
ESGPGSEPATSGSETPGTSESATPESGPGTSTEPSEGSAPGSPAGSPTSTEEGTSESATPESGPGSEPATSGSETPGTSESATPESGPGSPAGSPTSTEEGSPAGSPTSTEEGTSTEPSEGSAPGTSESATPESGPGTSESATPESGPGTSESATPESGPGSEPATSGSETPGSEPATSGSETPGSPAGSPTSTEEGTSTEPSEGSAPGTSTEPSEGSAPGSEPATSGSETPGTSESATPESGPGTSTEPSE

SEQ ID NO: 699 - protein, 288 aa, Artificial Sequence
  Description of Artificial Sequence: Synthetic polypeptide
TPESGPGTSTEPSEGSAPGTSESATPESGPGSEPATSGSETPGTSESATPESGPGSEPATSGSETPGTSESATPESGPGTSTEPSEGSAPGSPAGSPTSTEEGTSESATPESGPGSEPATSGSETPGTSESATPESGPGSPAGSPTSTEEGSPAGSPTSTEEGTSTEPSEGSAPGTSESATPESGPGTSESATPESGPGTSESATPESGPGSEPATSGSETPGSEPATSGSETPGSPAGSPTSTEEGTSTEPSEGSAPGTSTEPSEGSAPGSEPATSGSETPGTSESA

SEQ ID NO: 700 - protein, 324 aa, Artificial Sequence
  Description of Artificial Sequence: Synthetic polypeptide
PESGPGSPAGSPTSTEEGSPAGSPTSTEEGSPAGSPTSTEEGTSESATPESGPGTSTEPSEGSAPGTSESATPESGPGSEPATSGSETPGTSESATPESGPGSEPATSGSETPGTSESATPESGPGTSTEPSEGSAPGSPAGSPTSTEEGTSESATPESGPGSEPATSGSETPGTSESATPESGPGSPAGSPTSTEEGSPAGSPTSTEEGTSTEPSEGSAPGTSESATPESGPGTSESATPESGPGTSESATPESGPGSEPATSGSETPGSEPATSGSETPGSPAGSPTSTEEGTSTEPSEGSAPGTSTEPSEGSAPGSEPATS

SEQ ID NO: 701 - protein, 360 aa, Artificial Sequence
  Description of Artificial Sequence: Synthetic polypeptide
PESGPGTSTEPSEGSAPGTSESATPESGPGSPAGSPTSTEEGSPAGSPTSTEEGSPAGSPTSTEEGTSESATPESGPGTSTEPSEGSAPGTSESATPESGPGSEPATSGSETPGTSESATPESGPGSEPATSGSETPGTSESATPESGPGTSTEPSEGSAPGSPAGSPTSTEEGTSESATPESGPGSEPATSGSETPGTSESATPESGPGSPAGSPTSTEEGSPAGSPTSTEEGTSTEPSEGSAPGTSESATPESGPGTSESATPESGPGTSESATPESGPGSEPATSGSETPGSEPATSGSETPGSPAGSPTSTEEGTSTEPSEGSAPGTSTEPSEGSAPGSEPATSGSETPGTSESAT

SEQ ID NO: 702 - protein, 360 aa, Artificial Sequence
  Description of Artificial Sequence: Synthetic polypeptide
PESGPGSEPATSGSETPGTSESATPESGPGTSTEPSEGSAPGTSESATPESGPGSPAGSPTSTEEGSPAGSPTSTEEGSPAGSPTSTEEGTSESATPESGPGTSTEPSEGSAPGTSESATPESGPGSEPATSGSETPGTSESATPESGPGSEPATSGSETPGTSESATPESGPGTSTEPSEGSAPGSPAGSPTSTEEGTSESATPESGPGSEPATSGSETPGTSESATPESGPGSPAGSPTSTEEGSPAGSPTSTEEGTSTEPSEGSAPGTSESATPESGPGTSESATPESGPGTSESATPESGPGSEPATSGSETPGSEPATSGSETPGSPAGSPTSTEEGTSTEPSEGSAPGTSTEPS

SEQ ID NO: 703 - protein, 432 aa, Artificial Sequence
  Description of Artificial Sequence: Synthetic polypeptide
EGSAPGSPAGSPTSTEEGTSTEPSEGSAPGTSESATPESGPGSEPATSGSETPGTSESATPESGPGSEPATSGSETPGTSESATPESGPGTSTEPSEGSAPGTSESATPESGPGSPAGSPTSTEEGSPAGSPTSTEEGSPAGSPTSTEEGTSESATPESGPGTSTEPSEGSAPGTSESATPESGPGSEPATSGSETPGTSESATPESGPGSEPATSGSETPGTSESATPESGPGTSTEPSEGSAPGSPAGSPTSTEEGTSESATPESGPGSEPATSGSETPGTSESATPESGPGSPAGSPTSTEEGSPAGSPTSTEEGTSTEPSEGSAPGTSESATPESGPGTSESATPESGPGTSESATPESGPGSEPATSGSETPGSEPATSGSETPGSPAGSPTSTEEGTSTEPSEGSAPGTSTEPSEGSAPGSEPATS

SEQ ID NO: 704 - protein, 468 aa, Artificial Sequence
  Description of Artificial Sequence: Synthetic polypeptide
EGSAPGTSTEPSEGSAPGTSTEPSEGSAPGSPAGSPTSTEEGTSTEPSEGSAPGTSESATPESGPGSEPATSGSETPGTSESATPESGPGSEPATSGSETPGTSESATPESGPGTSTEPSEGSAPGTSESATPESGPGSPAGSPTSTEEGSPAGSPTSTEEGSPAGSPTSTEEGTSESATPESGPGTSTEPSEGSAPGTSESATPESGPGSEPATSGSETPGTSESATPESGPGSEPATSGSETPGTSESATPESGPGTSTEPSEGSAPGSPAGSPTSTEEGTSESATPESGPGSEPATSGSETPGTSESATPESGPGSPAGSPTSTEEGSPAGSPTSTEEGTSTEPSEGSAPGTSESATPESGPGTSESATPESGPGTSESATPESGPGSEPATSGSETPGSEPATSGSETPGSPAGSPTSTEEGTSTEPSEGSAPGTSTEPSEGSAPGSEPATSGSETPGTSESAT

SEQ ID NO: 705 - protein, 504 aa, Artificial Sequence
  Description of Artificial Sequence: Synthetic polypeptide
EGSAPGTSTEPSEGSAPGTSTEPSEGSAPGTSTEPSEGSAPGTSTEPSEGSAPGSPAGSPTSTEEGTSTEPSEGSAPGTSESATPESGPGSEPATSGSETPGTSESATPESGPGSEPATSGSETPGTSESATPESGPGTSTEPSEGSAPGTSESATPESGPGSPAGSPTSTEEGSPAGSPTSTEEGSPAGSPTSTEEGTSESATPESGPGTSTEPSEGSAPGTSESATPESGPGSEPATSGSETPGTSESATPESGPGSEPATSGSETPGTSESATPESGPGTSTEPSEGSAPGSPAGSPTSTEEGTSESATPESGPGSEPATSGSETPGTSESATPESGPGSPAGSPTSTEEGSPAGSPTSTEEGTSTEPSEGSAPGTSESATPESGPGTSESATPESGPGTSESATPESGPGSEPATSGSETPGSEPATSGSETPGSPAGSPTSTEEGTSTEPSEGSAPGTSTEPSEGSAPGSEPATSGSETPGTSESATPESGPGTSTEPS

SEQ ID NO: 706 - protein, 540 aa, Artificial Sequence
  Description of Artificial Sequence: Synthetic polypeptide
TPESGPGSPAGSPTSTEEGTSESATPESGPGSEPATSGSETPGTSESATPESGPGTSTEPSEGSAPGTSTEPSEGSAPGTSTEPSEGSAPGTSTEPSEGSAPGTSTEPSEGSAPGTSTEPSEGSAPGSPAGSPTSTEEGTSTEPSEGSAPGTSESATPESGPGSEPATSGSETPGTSESATPESGPGSEPATSGSETPGTSESATPESGPGTSTEPSEGSAPGTSESATPESGPGSPAGSPTSTEEGSPAGSPTSTEEGSPAGSPTSTEEGTSESATPESGPGTSTEPSEGSAPGTSESATPESGPGSEPATSGSETPGTSESATPESGPGSEPATSGSETPGTSESATPESGPGTSTEPSEGSAPGSPAGSPTSTEEGTSESATPESGPGSEPATSGSETPGTSESATPESGPGSPAGSPTSTEEGSPAGSPTSTEEGTSTEPSEGSAPGTSESATPESGPGTSESATPESGPGTSESATPESGPGSEPATSGSETPGSEPATSGSETPGSPAGSPTSTEEGTSTEPSEGSAPGTSTEP

SEQ ID NO: 707 - protein, 576 aa, Artificial Sequence
  Description of Artificial Sequence: Synthetic polypeptide
TPESGPGTSESATPESGPGSPAGSPTSTEEGTSESATPESGPGSEPATSGSETPGTSESATPESGPGTSTEPSEGSAPGTSTEPSEGSAPGTSTEPSEGSAPGTSTEPSEGSAPGTSTEPSEGSAPGTSTEPSEGSAPGSPAGSPTSTEEGTSTEPSEGSAPGTSESATPESGPGSEPATSGSETPGTSESATPESGPGSEPATSGSETPGTSESATPESGPGTSTEPSEGSAPGTSESATPESGPGSPAGSPTSTEEGSPAGSPTSTEEGSPAGSPTSTEEGTSESATPESGPGTSTEPSEGSAPGTSESATPESGPGSEPATSGSETPGTSESATPESGPGSEPATSGSETPGTSESATPESGPGTSTEPSEGSAPGSPAGSPTSTEEGTSESATPESGPGSEPATSGSETPGTSESATPESGPGSPAGSPTSTEEGSPAGSPTSTEEGTSTEPSEGSAPGTSESATPESGPGTSESATPESGPGTSESATPESGPGSEPATSGSETPGSEPATSGSETPGSPAGSPTSTEEGTSTEPSEGSAPGTSTEPSEGSAPGSEPATSGSETPGTSESA

SEQ ID NO: 708 - protein, 612 aa, Artificial Sequence
  Description of Artificial Sequence: Synthetic polypeptide
GSETPGTSTEPSEGSAPGTSTEPSEGSAPGTSESATPESGPGTSESATPESGPGSPAGSPTSTEEGTSESATPESGPGSEPATSGSETPGTSESATPESGPGTSTEPSEGSAPGTSTEPSEGSAPGTSTEPSEGSAPGTSTEPSEGSAPGTSTEPSEGSAPGTSTEPSEGSAPGSPAGSPTSTEEGTSTEPSEGSAPGTSESATPESGPGSEPATSGSETPGTSESATPESGPGSEPATSGSETPGTSESATPESGPGTSTEPSEGSAPGTSESATPESGPGSPAGSPTSTEEGSPAGSPTSTEEGSPAGSPTSTEEGTSESATPESGPGTSTEPSEGSAPGTSESATPESGPGSEPATSGSETPGTSESATPESGPGSEPATSGSETPGTSESATPESGPGTSTEPSEGSAPGSPAGSPTSTEEGTSESATPESGPGSEPATSGSETPGTSESATPESGPGSPAGSPTSTEEGSPAGSPTSTEEGTSTEPSEGSAPGTSESATPESGPGTSESATPESGPGTSESATPESGPGSEPATSGSETPGSEPATSGSETPGSPAGSPTSTEEGTSTEPSEGSAPGTSTEPSEGSAPGSEPATSGSETPGTSESAT

SEQ ID NO: 709 - protein, 648 aa, Artificial Sequence
  Description of Artificial Sequence: Synthetic polypeptide
PESGPGTSTEPSEGSAPGTSESATPESGPGSEPATSGSETPGTSTEPSEGSAPGTSTEPSEGSAPGTSESATPESGPGTSESATPESGPGSPAGSPTSTEEGTSESATPESGPGSEPATSGSETPGTSESATPESGPGTSTEPSEGSAPGTSTEPSEGSAPGTSTEPSEGSAPGTSTEPSEGSAPGTSTEPSEGSAPGTSTEPSEGSAPGSPAGSPTSTEEGTSTEPSEGSAPGTSESATPESGPGSEPATSGSETPGTSESATPESGPGSEPATSGSETPGTSESATPESGPGTSTEPSEGSAPGTSESATPESGPGSPAGSPTSTEEGSPAGSPTSTEEGSPAGSPTSTEEGTSESATPESGPGTSTEPSEGSAPGTSESATPESGPGSEPATSGSETPGTSESATPESGPGSEPATSGSETPGTSESATPESGPGTSTEPSEGSAPGSPAGSPTSTEEGTSESATPESGPGSEPATSGSETPGTSESATPESGPGSPAGSPTSTEEGSPAGSPTSTEEGTSTEPSEGSAPGTSESATPESGPGTSESATPESGPGTSESATPESGPGSEPATSGSETPGSEPATSGSETPGSPAGSPTSTEEGTSTEPSEGSAPGTSTEPSEGSAPGSEPATSGSETPGTSESAT

SEQ ID NO: 710 - protein, 684 aa, Artificial Sequence
  Description of Artificial Sequence: Synthetic polypeptide
EGSAPGSPAGSPTSTEEGTSTEPSEGSAPGTSTEPSEGSAPGTSESATPESGPGTSTEPSEGSAPGTSESATPESGPGSEPATSGSETPGTSTEPSEGSAPGTSTEPSEGSAPGTSESATPESGPGTSESATPESGPGSPAGSPTSTEEGTSESATPESGPGSEPATSGSETPGTSESATPESGPGTSTEPSEGSAPGTSTEPSEGSAPGTSTEPSEGSAPGTSTEPSEGSAPGTSTEPSEGSAPGTSTEPSEGSAPGSPAGSPTSTEEGTSTEPSEGSAPGTSESATPESGPGSEPATSGSETPGTSESATPESGPGSEPATSGSETPGTSESATPESGPGTSTEPSEGSAPGTSESATPESGPGSPAGSPTSTEEGSPAGSPTSTEEGSPAGSPTSTEEGTSESATPESGPGTSTEPSEGSAPGTSESATPESGPGSEPATSGSETPGTSESATPESGPGSEPATSGSETPGTSESATPESGPGTSTEPSEGSAPGSPAGSPTSTEEGTSESATPESGPGSEPATSGSETPGTSESATPESGPGSPAGSPTSTEEGSPAGSPTSTEEGTSTEPSEGSAPGTSESATPESGPGTSESATPESGPGTSESATPESGPGSEPATSGSETPGSEPATSGSETPGSPAGSPTSTEEGTSTEPSEGSAPGTSTEPSEGSAPGSEPATS

SEQ ID NO: 711 - protein, 720 aa, Artificial Sequence
  Description of Artificial Sequence: Synthetic polypeptide
TSGSETPGSEPATSGSETPGSPAGSPTSTEEGTSESATPESGPGTSTEPSEGSAPGTSTEPSEGSAPGSPAGSPTSTEEGTSTEPSEGSAPGTSTEPSEGSAPGTSESATPESGPGTSTEPSEGSAPGTSESATPESGPGSEPATSGSETPGTSTEPSEGSAPGTSTEPSEGSAPGTSESATPESGPGTSESATPESGPGSPAGSPTSTEEGTSESATPESGPGSEPATSGSETPGTSESATPESGPGTSTEPSEGSAPGTSTEPSEGSAPGTSTEPSEGSAPGTSTEPSEGSAPGTSTEPSEGSAPGTSTEPSEGSAPGSPAGSPTSTEEGTSTEPSEGSAPGTSESATPESGPGSEPATSGSETPGTSESATPESGPGSEPATSGSETPGTSESATPESGPGTSTEPSEGSAPGTSESATPESGPGSPAGSPTSTEEGSPAGSPTSTEEGSPAGSPTSTEEGTSESATPESGPGTSTEPSEGSAPGTSESATPESGPGSEPATSGSETPGTSESATPESGPGSEPATSGSETPGTSESATPESGPGTSTEPSEGSAPGSPAGSPTSTEEGTSESATPESGPGSEPATSGSETPGTSESATPESGPGSPAGSPTSTEEGSPAGSPTSTEEGTSTEPSEGSAPGTSESATPESGPGTSESATPESGPGTSESATPESGPGSEPATSGSETPGSEPATSGSETPGSPAGSPTSTEEGTSTE

SEQ ID NO: 712 - protein, 756 aa, Artificial Sequence
  Description of Artificial Sequence: Synthetic polypeptide
TSGSETPGSEPATSGSETPGSPAGSPTSTEEGTSESATPESGPGTSTEPSEGSAPGTSTEPSEGSAPGSPAGSPTSTEEGTSTEPSEGSAPGTSTEPSEGSAPGTSESATPESGPGTSTEPSEGSAPGTSESATPESGPGSEPATSGSETPGTSTEPSEGSAPGTSTEPSEGSAPGTSESATPESGPGTSESATPESGPGSPAGSPTSTEEGTSESATPESGPGSEPATSGSETPGTSESATPESGPGTSTEPSEGSAPGTSTEPSEGSAPGTSTEPSEGSAPGTSTEPSEGSAPGTSTEPSEGSAPGTSTEPSEGSAPGSPAGSPTSTEEGTSTEPSEGSAPGTSESATPESGPGSEPATSGSETPGTSESATPESGPGSEPATSGSETPGTSESATPESGPGTSTEPSEGSAPGTSESATPESGPGSPAGSPTSTEEGSPAGSPTSTEEGSPAGSPTSTEEGTSESATPESGPGTSTEPSEGSAPGTSESATPESGPGSEPATSGSETPGTSESATPESGPGSEPATSGSETPGTSESATPESGPGTSTEPSEGSAPGSPAGSPTSTEEGTSESATPESGPGSEPATSGSETPGTSESATPESGPGSPAGSPTSTEEGSPAGSPTSTEEGTSTEPSEGSAPGTSESATPESGPGTSESATPESGPGTSESATPESGPGSEPATSGSETPGSEPATSGSETPGSPAGSPTSTEEGTSTEPSEGSAPGTSTEPSEGSAPGSEPATSGSETPGTSES

SEQ ID NO: 713 - protein, 792 aa, Artificial Sequence
  Description of Artificial Sequence: Synthetic polypeptide
EGSAPGTSESATPESGPGSEPATSGSETPGSEPATSGSETPGSPAGSPTSTEEGTSESATPESGPGTSTEPSEGSAPGTSTEPSEGSAPGSPAGSPTSTEEGTSTEPSEGSAPGTSTEPSEGSAPGTSESATPESGPGTSTEPSEGSAPGTSESATPESGPGSEPATSGSETPGTSTEPSEGSAPGTSTEPSEGSAPGTSESATPESGPGTSESATPESGPGSPAGSPTSTEEGTSESATPESGPGSEPATSGSETPGTSESATPESGPGTSTEPSEGSAPGTSTEPSEGSAPGTSTEPSEGSAPGTSTEPSEGSAPGTSTEPSEGSAPGTSTEPSEGSAPGSPAGSPTSTEEGTSTEPSEGSAPGTSESATPESGPGSEPATSGSETPGTSESATPESGPGSEPATSGSETPGTSESATPESGPGTSTEPSEGSAPGTSESATPESGPGSPAGSPTSTEEGSPAGSPTSTEEGSPAGSPTSTEEGTSESATPESGPGTSTEPSEGSAPGTSESATPESGPGSEPATSGSETPGTSESATPESGPGSEPATSGSETPGTSESATPESGPGTSTEPSEGSAPGSPAGSPTSTEEGTSESATPESGPGSEPATSGSETPGTSESATPESGPGSPAGSPTSTEEGSPAGSPTSTEEGTSTEPSEGSAPGTSESATPESGPGTSESATPESGPGTSESATPESGPGSEPATSGSETPGSEPATSGSETPGSPAGSPTSTEEGTSTEPSEGSAPGTSTEPSEGSAPGSEPATSGSETPGTSESATPESGPGTSTEPS

SEQ ID NO: 714 - protein, 828 aa, Artificial Sequence
  Description of Artificial Sequence: Synthetic polypeptide
PESGPGTSTEPSEGSAPGSPAGSPTSTEEGTSTEPSEGSAPGTSTEPSEGSAPGTSESATPESGPGSEPATSGSETPGSEPATSGSETPGSPAGSPTSTEEGTSESATPESGPGTSTEPSEGSAPGTSTEPSEGSAPGSPAGSPTSTEEGTSTEPSEGSAPGTSTEPSEGSAPGTSESATPESGPGTSTEPSEGSAPGTSESATPESGPGSEPATSGSETPGTSTEPSEGSAPGTSTEPSEGSAPGTSESATPESGPGTSESATPESGPGSPAGSPTSTEEGTSESATPESGPGSEPATSGSETPGTSESATPESGPGTSTEPSEGSAPGTSTEPSEGSAPGTSTEPSEGSAPGTSTEPSEGSAPGTSTEPSEGSAPGTSTEPSEGSAPGSPAGSPTSTEEGTSTEPSEGSAPGTSESATPESGPGSEPATSGSETPGTSESATPESGPGSEPATSGSETPGTSESATPESGPGTSTEPSEGSAPGTSESATPESGPGSPAGSPTSTEEGSPAGSPTSTEEGSPAGSPTSTEEGTSESATPESGPGTSTEPSEGSAPGTSESATPESGPGSEPATSGSETPGTSESATPESGPGSEPATSGSETPGTSESATPESGPGTSTEPSEGSAPGSPAGSPTSTEEGTSESATPESGPGSEPATSGSETPGTSESATPESGPGSPAGSPTSTEEGSPAGSPTSTEEGTSTEPSEGSAPGTSESATPESGPGTSESATPESGPGTSESATPESGPGSEPATSGSETPGSEPATSGSETPGSPAGSPTSTEEGTSTEPSEGSAPGTSTEPSEGSAPGSEPATSGSETPGTSESAT

SEQ ID NO: 715 - protein, 869 aa, Artificial Sequence
  Description of Artificial Sequence: Synthetic polypeptide
GSPGSPAGSPTSTEEGTSESATPESGPGTSTEPSEGSAPGSPAGSPTSTEEGTSTEPSEGSAPGTSTEPSEGSAPGTSESATPESGPGSEPATSGSETPGSEPATSGSETPGSPAGSPTSTEEGTSESATPESGPGTSTEPSEGSAPGTSTEPSEGSAPGSPAGSPTSTEEGTSTEPSEGSAPGTSTEPSEGSAPGTSESATPESGPGTSTEPSEGSAPGTSESATPESGPGSEPATSGSETPGTSTEPSEGSAPGTSTEPSEGSAPGTSESATPESGPGTSESATPESGPGSPAGSPTSTEEGTSESATPESGPGSEPATSGSETPGTSESATPESGPGTSTEPSEGSAPGTSTEPSEGSAPGTSTEPSEGSAPGTSTEPSEGSAPGTSTEPSEGSAPGTSTEPSEGSAPGSPAGSPTSTEEGTSTEPSEGSAPGTSESATPESGPGSEPATSGSETPGTSESATPESGPGSEPATSGSETPGTSESATPESGPGTSTEPSEGSAPGTSESATPESGPGSPAGSPTSTEEGSPAGSPTSTEEGSPAGSPTSTEEGTSESATPESGPGTSTEPSEGSAPGTSESATPESGPGSEPATSGSETPGTSESATPESGPGSEPATSGSETPGTSESATPESGPGTSTEPSEGSAPGSPAGSPTSTEEGTSESATPESGPGSEPATSGSETPGTSESATPESGPGSPAGSPTSTEEGSPAGSPTSTEEGTSTEPSEGSAPGTSESATPESGPGTSESATPESGPGTSESATPESGPGSEPATSGSETPGSEPATSGSETPGSPAGSPTSTEEGTSTEPSEGSAPGTSTEPSEGSAPGSEPATSGSETPGTSESATPESGPGTSTEPSEGSAPGR

SEQ ID NO: 716 - protein, 144 aa, Artificial Sequence
  Description of Artificial Sequence: Synthetic polypeptide
SAGSPGSPAGSPTSTEEGTSESATPESGPGTSTEPSEGSAPGSPAGSPTSTEEGTSTEPSEGSAPGTSTEPSEGSAPGTSESATPESGPGSEPATSGSETPGSEPATSGSETPGSPAGSPTSTEEGTSESATPESGPGTESASR

SEQ ID NO: 717 - protein, 288 aa, Artificial Sequence
  Description of Artificial Sequence: Synthetic polypeptide
SAGSPTGPGSEPATSGSETPGTSESATPESGPGSEPATSGSETPGTSESATPESGPGTSTEPSEGSAPGSPAGSPTSTEEGTSESATPESGPGSEPATSGSETPGTSESATPESGPGSPAGSPTSTEEGSPAGSPTSTEEGTSTEPSEGSAPGTSESATPESGPGTSESATPESGPGTSESATPESGPGSEPATSGSETPGSEPATSGSETPGSPAGSPTSTEEGTSTEPSEGSAPGTSTEPSEGSAPGSEPATSGSETPGTSESATPESGPGTSTEPSEGSAPSASR

SEQ ID NO: 718 - protein, 432 aa, Artificial Sequence
  Description of Artificial Sequence: Synthetic polypeptide
SAGSPGSPAGSPTSTEEGTSESATPESGPGTSTEPSEGSAPGSPAGSPTSTEEGTSTEPSEGSAPGTSTEPSEGSAPGTSESATPESGPGSEPATSGSETPGSEPATSGSETPGSPAGSPTSTEEGTSESATPESGPGTSTEPSEGSAPGTSTEPSEGSAPGSPAGSPTSTEEGTSTEPSEGSAPGTSTEPSEGSAPGTSESATPESGPGTSTEPSEGSAPGTSESATPESGPGSEPATSGSETPGTSTEPSEGSAPGTSTEPSEGSAPGTSESATPESGPGTSESATPESGPGSPAGSPTSTEEGTSESATPESGPGSEPATSGSETPGTSESATPESGPGTSTEPSEGSAPGTSTEPSEGSAPGTSTEPSEGSAPGTSTEPSEGSAPGTSTEPSEGSAPGTSTEPSEGSAPGSPAGSPTSTEEGTESASR

SEQ ID NO: 719 - protein, 576 aa, Artificial Sequence
  Description of Artificial Sequence: Synthetic polypeptide
SAGSPTEEGTSESATPESGPGSEPATSGSETPGTSESATPESGPGTSTEPSEGSAPGTSTEPSEGSAPGTSTEPSEGSAPGTSTEPSEGSAPGTSTEPSEGSAPGTSTEPSEGSAPGSPAGSPTSTEEGTSTEPSEGSAPGTSESATPESGPGSEPATSGSETPGTSESATPESGPGSEPATSGSETPGTSESATPESGPGTSTEPSEGSAPGTSESATPESGPGSPAGSPTSTEEGSPAGSPTSTEEGSPAGSPTSTEEGTSESATPESGPGTSTEPSEGSAPGTSESATPESGPGSEPATSGSETPGTSESATPESGPGSEPATSGSETPGTSESATPESGPGTSTEPSEGSAPGSPAGSPTSTEEGTSESATPESGPGSEPATSGSETPGTSESATPESGPGSPAGSPTSTEEGSPAGSPTSTEEGTSTEPSEGSAPGTSESATPESGPGTSESATPESGPGTSESATPESGPGSEPATSGSETPGSEPATSGSETPGSPAGSPTSTEEGTSTEPSEGSAPGTSTEPSEGSAPGSEPATSGSETPGTSESATPESGPGTSTEPSEGSAPSASR

SEQ ID NO: 720 - protein, 864 aa, Artificial Sequence
  Description of Artificial Sequence: Synthetic polypeptide
SAGSPGSPAGSPTSTEEGTSESATPESGPGTSTEPSEGSAPGSPAGSPTSTEEGTSTEPSEGSAPGTSTEPSEGSAPGTSESATPESGPGSEPATSGSETPGSEPATSGSETPGSPAGSPTSTEEGTSESATPESGPGTSTEPSEGSAPGTSTEPSEGSAPGSPAGSPTSTEEGTSTEPSEGSAPGTSTEPSEGSAPGTSESATPESGPGTSTEPSEGSAPGTSESATPESGPGSEPATSGSETPGTSTEPSEGSAPGTSTEPSEGSAPGTSESATPESGPGTSESATPESGPGSPAGSPTSTEEGTSESATPESGPGSEPATSGSETPGTSESATPESGPGTSTEPSEGSAPGTSTEPSEGSAPGTSTEPSEGSAPGTSTEPSEGSAPGTSTEPSEGSAPGTSTEPSEGSAPGSPAGSPTSTEEGTSTEPSEGSAPGTSESATPESGPGSEPATSGSETPGTSESATPESGPGSEPATSGSETPGTSESATPESGPGTSTEPSEGSAPGTSESATPESGPGSPAGSPTSTEEGSPAGSPTSTEEGSPAGSPTSTEEGTSESATPESGPGTSTEPSEGSAPGTSESATPESGPGSEPATSGSETPGTSESATPESGPGSEPATSGSETPGTSESATPESGPGTSTEPSEGSAPGSPAGSPTSTEEGTSESATPESGPGSEPATSGSETPGTSESATPESGPGSPAGSPTSTEEGSPAGSPTSTEEGTSTEPSEGSAPGTSESATPESGPGTSESATPESGPGTSESATPESGPGSEPATSGSETPGSEPATSGSETPGSPAGSPTSTEEGTSTEPSEGSAPGTSTEPSEGSAPGSEPATSGSETPGTSESATPESGPGTESASR

SEQ ID NO: 721 - protein, 712 aa, Artificial Sequence
  Description of Artificial Sequence: Synthetic polypeptide
PGSPAGSPTSTEEGTSESATPESGPGTSTEPSEGSAPGSPAGSPTSTEEGTSTEPSEGSAPGTSTEPSEGSAPGTSESATPESGPGSEPATSGSETPGSEPATSGSETPGSPAGSPTSTEEGTSESATPESGPGTSTEPSEGSAPGTSTEPSEGSAPGSPAGSPTSTEEGTSTEPSEGSAPGTSTEPSEGSAPGTSESATPESGPGTSTEPSEGSAPGTSESATPESGPGSEPATSGSETPGTSTEPSEGSAPGTSTEPSEGSAPGTSESATPESGPGTSESATPESGPGSPAGSPTSTEEGTSESATPESGPGSEPATSGSETPGTSESATPESGPGTSTEPSEGSAPGTSTEPSEGSAPGTSTEPSEGSAPGTSTEPSEGSAPGTSTEPSEGSAPGTSTEPSEGSAPGSPAGSPTSTEEGTSTEPSEGSAPGTSESATPESGPGSEPATSGSETPGTSESATPESGPGSEPATSGSETPGTSESATPESGPGTSTEPSEGSAPGTSESATPESGPGSPAGSPTSTEEGSPAGSPTSTEEGSPAGSPTSTEEGTSESATPESGPGTSTEPSEGSAPGTSESATPESGPGSEPATSGSETPGTSESATPESGPGSEPATSGSETPGTSESATPESGPGTSTEPSEGSAPGSPAGSPTSTEEGTSESATPESGPGSEPATSGSETPGTSESATPESGPGSPAGSPTSTEAHHH

SEQ ID NO: 722 - protein, 864 aa, Artificial Sequence
  Description of Artificial Sequence: Synthetic polypeptide
GSPGAGSPAGSPTSTEEGTSESATPESGPGTSTEPSEGSAPGSPAGSPTSTEEGTSTEPSEGSAPGTSTEPSEGSAPGTSESATPESGPGSEPATSGSETPGSEPATSGSETPGSPAGSPTSTEEGTSESATPESGPGTSTEPSEGSAPGTSTEPSEGSAPGSPAGSPTSTEEGTSTEPSEGSAPGTSTEPSEGSAPGTSESATPESGPGTSTEPSEGSAPGTSESATPESGPGSEPATSGSETPGTSTEPSEGSAPGTSTEPSEGSAPGTSESATPESGPGTSESATPESGPGSPAGSPTSTEEGTSESATPESGPGSEPATSGSETPGTSESATPESGPGTSTEPSEGSAPGTSTEPSEGSAPGTSTEPSEGSAPGTSTEPSEGSAPGTSTEPSEGSAPGTSTEPSEGSAPGSPAGSPTSTEEGTSTEPSEGSAPGTSESATPESGPGSEPATSGSETPGTSESATPESGPGSEPATSGSETPGTSESATPESGPGTSTEPSEGSAPGTSESATPESGPGSPAGSPTSTEEGSPAGSPTSTEEGSPAGSPTSTEEGTSESATPESGPGTSTEPSEGSAPGTSESATPESGPGSEPATSGSETPGTSESATPESGPGSEPATSGSETPGTSESATPESGPGTSTEPSEGSAPGSPAGSPTSTEEGTSESATPESGPGSEPATSGSETPGTSESATPESGPGSPAGSPTSTEEGSPAGSPTSTEEGTSTEPSEGSAPGTSESATPESGPGTSESATPESGPGTSESATPESGPGSEPATSGSETPGSEPATSGSETPGSPAGSPTSTEEGTSTEPSEGSAPGTSTEPSEGSAPGSEPATSGSETPGTSESATPESGPGTESASR

SEQ ID NO: 723 - protein, 288 aa, Artificial Sequence
  Description of Artificial Sequence: Synthetic polypeptide
SPAGSPTSTEEGTSESATPESGPGTSTEPSEGSAPGTSESATPESGPGSEPATSGSETPGTSESATPESGPGSEPATSGSETPGTSESATPESGPGTSTEPSEGSAPGSPAGSPTSTEEGTSESATPESGPGSEPATSGSETPGTSESATPESGPGSPAGSPTSTEEGSPAGSPTSTEEGTSTEPSEGSAPGTSESATPESGPGTSESATPESGPGTSESATPESGPGSEPATSGSETPGSEPATSGSETPGSPAGSPTSTEEGTSTEPSEGSAPGTSTEPSEGSAPG

SEQ ID NO: 724 - protein, 284 aa, Artificial Sequence
  Description of Artificial Sequence: Synthetic polypeptide
GTSESATPESGPGSEPATSGSETPGTSESATPESGPGSEPATSGSETPGTSESATPESGPGTSTEPSEGSAPGSPAGSPTSTEEGTSESATPESGPGSEPATSGSETPGTSESATPESGPGSPAGSPTSTEEGSPAGSPTSTEEGTSTEPSEGSAPGTSESATPESGPGTSESATPESGPGTSESATPESGPGSEPATSGSETPGSEPATSGSETPGSPAGSPTSTEEGTSTEPSEGSAPGTSTEPSEGSAPGSEPATSGSETPGTSESATPESGPGTSTEPSE

SEQ ID NO: 725 - protein, 292 aa, Artificial Sequence
  Description of Artificial Sequence: Synthetic polypeptide
SPAGSPTSTEEGTSESATPESGPGTSTEPSEGSAPGTSESATPESGPGSEPATSGSETPGTSESATPESGPGSEPATSGSETPGTSESATPESGPGTSTEPSEGSAPGSPAGSPTSTEEGTSESATPESGPGSEPATSGSETPGTSESATPESGPGSPAGSPTSTEEGSPAGSPTSTEEGTSTEPSEGSAPGTSESATPESGPGTSESATPESGPGTSESATPESGPGSEPATSGSETPGSEPATSGSETPGSPAGSPTSTEEGTSTEPSEGSAPGTSTEPSEGSAPGGSAP

SEQ ID NO: 726 - protein, 864 aa, Artificial Sequence
  Description of Artificial Sequence: Synthetic polypeptide
AGSPTSTEEGTSESATPESGPGTSTEPSEGSAPGSPAGSPTSTEEGTSTEPSEGSAPGTSTEPSEGSAPGTSESATPESGPGSEPATSGSETPGSEPATSGSETPGSPAGSPTSTEEGTSESATPESGPGTSTEPSEGSAPGTSTEPSEGSAPGSPAGSPTSTEEGTSTEPSEGSAPGTSTEPSEGSAPGTSESATPESGPGTSTEPSEGSAPGTSESATPESGPGSEPATSGSETPGTSTEPSEGSAPGTSTEPSEGSAPGTSESATPESGPGTSESATPESGPGSPAGSPTSTEEGTSESATPESGPGSEPATSGSETPGTSESATPESGPGTSTEPSEGSAPGTSTEPSEGSAPGTSTEPSEGSAPGTSTEPSEGSAPGTSTEPSEGSAPGTSTEPSEGSAPGSPAGSPTSTEEGTSTEPSEGSAPGTSESATPESGPGSEPATSGSETPGTSESATPESGPGSEPATSGSETPGTSESATPESGPGTSTEPSEGSAPGTSESATPESGPGSPAGSPTSTEEGSPAGSPTSTEEGSPAGSPTSTEEGTSESATPESGPGTSTEPSEGSAPGTSESATPESGPGSEPATSGSETPGTSESATPESGPGSEPATSGSETPGTSESATPESGPGTSTEPSEGSAPGSPAGSPTSTEEGTSESATPESGPGSEPATSGSETPGTSESATPESGPGSPAGSPTSTEEGSPAGSPTSTEEGTSTEPSEGSAPGTSESATPESGPGTSESATPESGPGTSESATPESGPGSEPATSGSETPGSEPATSGSETPGSPAGSPTSTEEGTSTEPSEGSAPGTSTEPSEGSAPGSEPATSGSETPGTSESATPESGPGTSTEPSEGAAEPEA

SEQ ID NO: 727 - protein, 867 aa, Artificial Sequence
  Description of Artificial Sequence: Synthetic polypeptide
GSPAGSPTSTEEGTSESATPESGPGTSTEPSEGSAPGSPAGSPTSTEEGTSTEPSEGSAPGTSTEPSEGSAPGTSESATPESGPGSEPATSGSETPGSEPATSGSETPGSPAGSPTSTEEGTSESATPESGPGTSTEPSEGSAPGTSTEPSEGSAPGSPAGSPTSTEEGTSTEPSEGSAPGTSTEPSEGSAPGTSESATPESGPGTSTEPSEGSAPGTSESATPESGPGSEPATSGSETPGTSTEPSEGSAPGTSTEPSEGSAPGTSESATPESGPGTSESATPESGPGSPAGSPTSTEEGTSESATPESGPGSEPATSGSETPGTSESATPESGPGTSTEPSEGSAPGTSTEPSEGSAPGTSTEPSEGSAPGTSTEPSEGSAPGTSTEPSEGSAPGTSTEPSEGSAPGSPAGSPTSTEEGTSTEPSEGSAPGTSESATPESGPGSEPATSGSETPGTSESATPESGPGSEPATSGSETPGTSESATPESGPGTSTEPSEGSAPGTSESATPESGPGSPAGSPTSTEEGSPAGSPTSTEEGSPAGSPTSTEEGTSESATPESGPGTSTEPSEGSAPGTSESATPESGPGSEPATSGSETPGTSESATPESGPGSEPATSGSETPGTSESATPESGPGTSTEPSEGSAPGSPAGSPTSTEEGTSESATPESGPGSEPATSGSETPGTSESATPESGPGSPAGSPTSTEEGSPAGSPTSTEEGTSTEPSEGSAPGTSESATPESGPGTSESATPESGPGTSESATPESGPGSEPATSGSETPGSEPATSGSETPGSPAGSPTSTEEGTSTEPSEGSAPGTSTEPSEGSAPGSEPATSGSETPGTSESATPESGPGTSTEPSEGAAEPEA

SEQ ID NO: 728 - protein, 867 aa, Artificial Sequence
  Description of Artificial Sequence: Synthetic polypeptide
SPGSPAGSPTSTEEGTSESATPESGPGTSTEPSEGSAPGSPAGSPTSTEEGTSTEPSEGSAPGTSTEPSEGSAPGTSESATPESGPGSEPATSGSETPGSEPATSGSETPGSPAGSPTSTEEGTSESATPESGPGTSTEPSEGSAPGTSTEPSEGSAPGSPAGSPTSTEEGTSTEPSEGSAPGTSTEPSEGSAPGTSESATPESGPGTSTEPSEGSAPGTSESATPESGPGSEPATSGSETPGTSTEPSEGSAPGTSTEPSEGSAPGTSESATPESGPGTSESATPESGPGSPAGSPTSTEEGTSESATPESGPGSEPATSGSETPGTSESATPESGPGTSTEPSEGSAPGTSTEPSEGSAPGTSTEPSEGSAPGTSTEPSEGSAPGTSTEPSEGSAPGTSTEPSEGSAPGSPAGSPTSTEEGTSTEPSEGSAPGTSESATPESGPGSEPATSGSETPGTSESATPESGPGSEPATSGSETPGTSESATPESGPGTSTEPSEGSAPGTSESATPESGPGSPAGSPTSTEEGSPAGSPTSTEEGSPAGSPTSTEEGTSESATPESGPGTSTEPSEGSAPGTSESATPESGPGSEPATSGSETPGTSESATPESGPGSEPATSGSETPGTSESATPESGPGTSTEPSEGSAPGSPAGSPTSTEEGTSESATPESGPGSEPATSGSETPGTSESATPESGPGSPAGSPTSTEEGSPAGSPTSTEEGTSTEPSEGSAPGTSESATPESGPGTSESATPESGPGTSESATPESGPGSEPATSGSETPGSEPATSGSETPGSPAGSPTSTEEGTSTEPSEGSAPGTSTEPSEGSAPGSEPATSGSETPGTSESATPESGPGTSTEPSEGSAPG

SEQ ID NO: 729 - protein, 868 aa, Artificial Sequence
  Description of Artificial Sequence: Synthetic polypeptide
PGSPAGSPTSTEEGTSESATPESGPGTSTEPSEGSAPGSPAGSPTSTEEGTSTEPSEGSAPGTSTEPSEGSAPGTSESATPESGPGSEPATSGSETPGSEPATSGSETPGSPAGSPTSTEEGTSESATPESGPGTSTEPSEGSAPGTSTEPSEGSAPGSPAGSPTSTEEGTSTEPSEGSAPGTSTEPSEGSAPGTSESATPESGPGTSTEPSEGSAPGTSESATPESGPGSEPATSGSETPGTSTEPSEGSAPGTSTEPSEGSAPGTSESATPESGPGTSESATPESGPGSPAGSPTSTEEGTSESATPESGPGSEPATSGSETPGTSESATPESGPGTSTEPSEGSAPGTSTEPSEGSAPGTSTEPSEGSAPGTSTEPSEGSAPGTSTEPSEGSAPGTSTEPSEGSAPGSPAGSPTSTEEGTSTEPSEGSAPGTSESATPESGPGSEPATSGSETPGTSESATPESGPGSEPATSGSETPGTSESATPESGPGTSTEPSEGSAPGTSESATPESGPGSPAGSPTSTEEGSPAGSPTSTEEGSPAGSPTSTEEGTSESATPESGPGTSTEPSEGSAPGTSESATPESGPGSEPATSGSETPGTSESATPESGPGSEPATSGSETPGTSESATPESGPGTSTEPSEGSAPGSPAGSPTSTEEGTSESATPESGPGSEPATSGSETPGTSESATPESGPGSPAGSPTSTEEGSPAGSPTSTEEGTSTEPSEGSAPGTSESATPESGPGTSESATPESGPGTSESATPESGPGSEPATSGSETPGSEPATSGSETPGSPAGSPTSTEEGTSTEPSEGSAPGTSTEPSEGSAPGSEPATSGSETPGTSESATPESGPGTSTEPSEGAAEPEA

SEQ ID NO: 730 - protein, 144 aa, Artificial Sequence
  Description of Artificial Sequence: Synthetic polypeptide
GSPAGSPTSTEEGTSESATPESGPGTSTEPSEGSAPGSPAGSPTSTEEGTSTEPSEGSAPGTSTEPSEGSAPGTSESATPESGPGSEPATSGSETPGSEPATSGSETPGSPAGSPTSTEEGTSESATPESGPGTSTEPSEGSAP

SEQ ID NO: 731 - protein, 292 aa, Artificial Sequence; identical to SEQ ID NO: 725
  Description of Artificial Sequence: Synthetic polypeptide

SEQ ID NO: 732 - protein, 293 aa, Artificial Sequence
  Description of Artificial Sequence: Synthetic polypeptide
PGSPAGSPTSTEEGTSESATPESGPGTSTEPSEGSAPGSPAGSPTSTEEGTSTEPSEGSAPGTSTEPSEGSAPGTSESATPESGPGSEPATSGSETPGSEPATSGSETPGSPAGSPTSTEEGTSESATPESGPGTSTEPSEGSAPGTSTEPSEGSAPGSPAGSPTSTEEGTSTEPSEGSAPGTSTEPSEGSAPGTSESATPESGPGTSTEPSEGSAPGTSESATPESGPGSEPATSGSETPGTSTEPSEGSAPGTSTEPSEGSAPGTSESATPESGPGTSESATPEGAAEPEA

SEQ ID NO: 733 - protein, 300 aa, Artificial Sequence
  Description of Artificial Sequence: Synthetic polypeptide
PGSPAGSPTSTEEGTSESATPESGPGTSTEPSEGSAPGSPAGSPTSTEEGTSTEPSEGSAPGTSTEPSEGSAPGTSESATPESGPGSEPATSGSETPGSEPATSGSETPGSPAGSPTSTEEGTSESATPESGPGTSTEPSEGSAPGTSTEPSEGSAPGSPAGSPTSTEEGTSTEPSEGSAPGTSTEPSEGSAPGTSESATPESGPGTSTEPSEGSAPGTSESATPESGPGSEPATSGSETPGTSTEPSEGSAPGTSTEPSEGSAPGTSESATPESGPGTSESATPESGPGSPAGAAEPEA

SEQ ID NO: 734 - protein, 584 aa, Artificial Sequence
  Description of Artificial Sequence: Synthetic polypeptide
PGSPAGSPTSTEEGTSESATPESGPGTSTEPSEGSAPGSPAGSPTSTEEGTSTEPSEGSAPGTSTEPSEGSAPGTSESATPESGPGSEPATSGSETPGSEPATSGSETPGSPAGSPTSTEEGTSESATPESGPGTSTEPSEGSAPGTSTEPSEGSAPGSPAGSPTSTEEGTSTEPSEGSAPGTSTEPSEGSAPGTSESATPESGPGTSTEPSEGSAPGTSESATPESGPGSEPATSGSETPGTSTEPSEGSAPGTSTEPSEGSAPGTSESATPESGPGTSESATPESGPGSPAGSPTSTEEGTSESATPESGPGSEPATSGSETPGTSESATPESGPGTSTEPSEGSAPGTSTEPSEGSAPGTSTEPSEGSAPGTSTEPSEGSAPGTSTEPSEGSAPGTSTEPSEGSAPGSPAGSPTSTEEGTSTEPSEGSAPGTSESATPESGPGSEPATSGSETPGTSESATPESGPGSEPATSGSETPGTSESATPESGPGTSTEPSEGSAPGTSESATPESGPGSPAGSPTSTEEGSPAGSPTSTEEGSPAGSPTSTEEGTSESATPESGPGTSTEPSEGSAPGAAEPEA

SEQ ID NO: 735 - protein, 14 aa, Artificial Sequence
  Description of Artificial Sequence: Synthetic peptide
RSSNGAVTSSNYAN

SEQ ID NO: 736 - protein, 14 aa, Artificial Sequence
  Description of Artificial Sequence: Synthetic peptide
RSSNGEVTTSNYAN

SEQ ID NO: 737 - protein, 14 aa, Artificial Sequence
  Description of Artificial Sequence: Synthetic peptide
RSSTGAVTTSNYAN

SEQ ID NO: 738 - protein, 7 aa, Artificial Sequence
  Description of Artificial Sequence: Synthetic peptide
GTNKRAP

SEQ ID NO: 739 - protein, 7 aa, Artificial Sequence
  Description of Artificial Sequence: Synthetic peptide
GTIKRAP

SEQ ID NO: 740 - protein, 10 aa, Artificial Sequence
  Description of Artificial Sequence: Synthetic peptide
ALWYPNLWVF

SEQ ID NO: 741 - protein, 10 aa, Artificial Sequence
  Description of Artificial Sequence: Synthetic peptide
ALWYSNLWVF

SEQ ID NO: 742 - protein, 10 aa, Artificial Sequence
  Description of Artificial Sequence: Synthetic peptide
GFTFNTYAMN

SEQ ID NO: 743 - protein, 19 aa, Artificial Sequence
  Description of Artificial Sequence: Synthetic peptide
RIRSKYNNYATYYADSVKD

SEQ ID NO: 744 - protein, 14 aa, Artificial Sequence
  Description of Artificial Sequence: Synthetic peptide
HENFGNSYVSWFAH

SEQ ID NO: 745 - protein, 14 aa, Artificial Sequence
  Description of Artificial Sequence: Synthetic peptide
HGNFGNSYVSWFAY

SEQ ID NO: 746 - protein, 22 aa, Artificial Sequence
  Description of Artificial Sequence: Synthetic peptide
ELVVTQEPSLTVSPGGTVTLTC

SEQ ID NO: 747 - protein, 15 aa, Artificial Sequence
  Description of Artificial Sequence: Synthetic peptide
WVQQKPGQAPRGLIG

SEQ ID NO: 748 - protein, 32 aa, Artificial Sequence
  Description of Artificial Sequence: Synthetic polypeptide
GTPARFSGSLLGGKAALTLSGVQPEDEAVYYC

SEQ ID NO: 749 - protein, 32 aa, Artificial Sequence
  Description of Artificial Sequence: Synthetic polypeptide
GTPARFSGSSLGGKAALTLSGVQPEDEAVYYC

SEQ ID NO: 750 - protein, 32 aa, Artificial Sequence
  Description of Artificial Sequence: Synthetic polypeptide
GTPARFSGSLLGGSAALTLSGVQPEDEAVYYC

SEQ ID NO: 751 - protein, 32 aa, Artificial Sequence
  Description of Artificial Sequence: Synthetic polypeptide
GTPARFSGSSLGGSAALTLSGVQPEDEAVYYC

SEQ ID NO: 752 - protein, 32 aa, Artificial Sequence
  Description of Artificial Sequence: Synthetic polypeptide
GTPARFSGSLLGGKAALTLSGVQPEDEAEYYC

SEQ ID NO: 753 - protein, 32 aa, Artificial Sequence
  Description of Artificial Sequence: Synthetic polypeptide
GTPARFSGSSLGGSAALTLSGVQPEDEAEYYC

SEQ ID NO: 754 - protein, 9 aa, Artificial Sequence
  Description of Artificial Sequence: Synthetic peptide
GGGTKLTVL

SEQ ID NO: 755 - protein, 25 aa, Artificial Sequence
  Description of Artificial Sequence: Synthetic peptide
EVQLLESGGGIVQPGGSLKLSCAAS

SEQ ID NO: 756 - protein, 25 aa, Artificial Sequence
  Description of Artificial Sequence: Synthetic peptide
EVQLQESGGGIVQPGGSLKLSCAAS

SEQ ID NO: 757 - protein, 25 aa, Artificial Sequence
  Description of Artificial Sequence: Synthetic peptide
EVQLQESGGGLVQPGGSLKLSCAAS

SEQ ID NO: 758 - protein, 25 aa, Artificial Sequence
  Description of Artificial Sequence: Synthetic peptide
EVQLLESGGGLVQPGGSLKLSCAAS

SEQ ID NO: 759 - protein, 14 aa, Artificial Sequence
  Description of Artificial Sequence: Synthetic peptide
WVRQAPGKGLEWVA

SEQ ID NO: 760 - protein, 32 aa, Artificial Sequence
  Description of Artificial Sequence: Synthetic polypeptide
RFTISRDDSKNTVYLQMNNLKTEDTAVYYCVR

SEQ ID NO: 761 - skipped

SEQ ID NO: 762 - protein, 32 aa, Artificial Sequence
  Description of Artificial Sequence: Synthetic polypeptide
RFTISRDDSKNTAYLQMNNLKTEDTAVYYCVR

SEQ ID NO: 763 - skipped

SEQ ID NO: 764 - protein, 11 aa, Artificial Sequence
  Description of Artificial Sequence: Synthetic peptide
WGQGTLVTVSS

SEQ ID NO: 765 - protein, 109 aa, Artificial Sequence
  Description of Artificial Sequence: Synthetic polypeptide
ELVVTQEPSLTVSPGGTVTLTCRSSNGAVTSSNYANWVQQKPGQAPRGLIGGTNKRAPGTPARFSGSLLGGKAALTLSGVQPEDEAVYYCALWYPNLWVFGGGTKLTVL

SEQ ID NO: 766 - protein, 125 aa, Artificial Sequence
  Description of Artificial Sequence: Synthetic polypeptide
EVQLLESGGGIVQPGGSLKLSCAASGFTFNTYAMNWVRQAPGKGLEWVARIRSKYNNYATYYADSVKDRFTISRDDSKNTVYLQMNNLKTEDTAVYYCVRHENFGNSYVSWFAHWGQGTLVTVSS

SEQ ID NO: 767 - protein, 109 aa, Artificial Sequence
  Description of Artificial Sequence: Synthetic polypeptide
ELVVTQEPSLTVSPGGTVTLTCRSSNGEVTTSNYANWVQQKPGQAPRGLIGGTIKRAPGTPARFSGSLLGGKAALTLSGVQPEDEAVYYCALWYPNLWVFGGGTKLTVL

SEQ ID NO: 768 - protein, 109 aa, Artificial Sequence
  Description of Artificial Sequence: Synthetic polypeptide
ELVVTQEPSLTVSPGGTVTLTCRSSNGAVTSSNYANWVQQKPGQAPRGLIGGTNKRAPGTPARFSGSSLGGKAALTLSGVQPEDEAVYYCALWYPNLWVFGGGTKLTVL

SEQ ID NO: 769 - protein, 125 aa, Artificial Sequence
  Description of Artificial Sequence: Synthetic polypeptide
EVQLQESGGGIVQPGGSLKLSCAASGFTFNTYAMNWVRQAPGKGLEWVARIRSKYNNYATYYADSVKDRFTISRDDSKNTVYLQMNNLKTEDTAVYYCVRHENFGNSYVSWFAHWGQGTLVTVSS

SEQ ID NO: 770 - protein, 109 aa, Artificial Sequence
  Description of Artificial Sequence: Synthetic polypeptide
ELVVTQEPSLTVSPGGTVTLTCRSSNGAVTSSNYANWVQQKPGQAPRGLIGGTNKRAPGTPARFSGSLLGGSAALTLSGVQPEDEAVYYCALWYPNLWVFGGGTKLTVL

SEQ ID NO: 771 - protein, 109 aa, Artificial Sequence
  Description of Artificial Sequence: Synthetic polypeptide
ELVVTQEPSLTVSPGGTVTLTCRSSNGAVTSSNYANWVQQKPGQAPRGLIGGTNKRAPGTPARFSGSSLGGSAALTLSGVQPEDEAVYYCALWYPNLWVFGGGTKLTVL

SEQ ID NO: 772 - protein, 109 aa, Artificial Sequence
  Description of Artificial Sequence: Synthetic polypeptide
ELVVTQEPSLTVSPGGTVTLTCRSSTGAVTTSNYANWVQQKPGQAPRGLIGGTNKRAPGTPARFSGSLLGGKAALTLSGVQPEDEAEYYCALWYSNLWVFGGGTKLTVL

SEQ ID NO: 773 - protein, 125 aa, Artificial Sequence
  Description of Artificial Sequence: Synthetic polypeptide
EVQLLESGGGLVQPGGSLKLSCAASGFTFNTYAMNWVRQAPGKGLEWVARIRSKYNNYATYYADSVKDRFTISRDDSKNTAYLQMNNLKTEDTAVYYCVRHGNFGNSYVSWFAYWGQGTLVTVSS

SEQ ID NO: 774 - protein, 109 aa, Artificial Sequence
  Description of Artificial Sequence: Synthetic polypeptide
ELVVTQEPSLTVSPGGTVTLTCRSSTGAVTTSNYANWVQQKPGQAPRGLIGGTNKRAPGTPARFSGSSLGGSAALTLSGVQPEDEAEYYCALWYSNLWVFGGGTKLTVL

SEQ ID NO: 775 - protein, 125 aa, Artificial Sequence
  Description of Artificial Sequence: Synthetic polypeptide
EVQLQESGGGLVQPGGSLKLSCAASGFTFNTYAMNWVRQAPGKGLEWVARIRSKYNNYATYYADSVKDRFTISRDDSKNTAYLQMNNLKTEDTAVYYCVRHGNFGNSYVSWFAYWGQGTLVTVSS

SEQ ID NO: 776 - protein, 264 aa, Artificial Sequence
  Description of Artificial Sequence: Synthetic polypeptide
ELVVTQEPSLTVSPGGTVTLTCRSSNGAVTSSNYANWVQQKPGQAPRGLIGGTNKRAPGTPARFSGSLLGGKAALTLSGVQPEDEAVYYCALWYPNLWVFGGGTKLTVLGATPPETGAETESPGETTGGSAESEPPGEGEVQLLESGGGIVQPGGSLKLSCAASGFTFNTYAMNWVRQAPGKGLEWVARIRSKYNNYATYYADSVKDRFTISRDDSKNTVYLQMNNLKTEDTAVYYCVRHENFGNSYVSWFAHWGQGTLVTVSS

SEQ ID NO: 777 - protein, 264 aa, Artificial Sequence
  Description of Artificial Sequence: Synthetic polypeptide
ELVVTQEPSLTVSPGGTVTLTCRSSNGEVTTSNYANWVQQKPGQAPRGLIGGTIKRAPGTPARFSGSLLGGKAALTLSGVQPEDEAVYYCALWYPNLWVFGGGTKLTVLGATPPETGAETESPGETTGGSAESEPPGEGEVQLLESGGGIVQPGGSLKLSCAASGFTFNTYAMNWVRQAPGKGLEWVARIRSKYNNYATYYADSVKDRFTISRDDSKNTVYLQMNNLKTEDTAVYYCVRHENFGNSYVSWFAHWGQGTLVTVSS

SEQ ID NO: 778 - protein, 264 aa, Artificial Sequence
  Description of Artificial Sequence: Synthetic polypeptide
ELVVTQEPSLTVSPGGTVTLTCRSSNGAVTSSNYANWVQQKPGQAPRGLIGGTNKRAPGTPARFSGSSLGGKAALTLSGVQPEDEAVYYCALWYPNLWVFGGGTKLTVLGATPPETGAETESPGETTGGSAESEPPGEGEVQLQESGGGIVQPGGSLKLSCAASGFTFNTYAMNWVRQAPGKGLEWVARIRSKYNNYATYYADSVKDRFTISRDDSKNTVYLQMNNLKTEDTAVYYCVRHENFGNSYVSWFAHWGQGTLVTVSS

SEQ ID NO: 779 - protein, 264 aa, Artificial Sequence
  Description of Artificial Sequence: Synthetic polypeptide
ELVVTQEPSLTVSPGGTVTLTCRSSNGAVTSSNYANWVQQKPGQAPRGLIGGTNKRAPGTPARFSGSLLGGSAALTLSGVQPEDEAVYYCALWYPNLWVFGGGTKLTVLGATPPETGAETESPGETTGGSAESEPPGEGEVQLQESGGGIVQPGGSLKLSCAASGFTFNTYAMNWVRQAPGKGLEWVARIRSKYNNYATYYADSVKDRFTISRDDSKNTVYLQMNNLKTEDTAVYYCVRHENFGNSYVSWFAHWGQGTLVTVSS

SEQ ID NO: 780 - protein, 264 aa, Artificial Sequence
  Description of Artificial Sequence: Synthetic polypeptide
ELVVTQEPSLTVSPGGTVTLTCRSSNGAVTSSNYANWVQQKPGQAPRGLIGGTNKRAPGTPARFSGSSLGGSAALTLSGVQPEDEAVYYCALWYPNLWVFGGGTKLTVLGATPPETGAETESPGETTGGSAESEPPGEGEVQLQESGGGIVQPGGSLKLSCAASGFTFNTYAMNWVRQAPGKGLEWVARIRSKYNNYATYYADSVKDRFTISRDDSKNTVYLQMNNLKTEDTAVYYCVRHENFGNSYVSWFAHWGQGTLVTVSS

SEQ ID NO: 781 - protein, 264 aa, Artificial Sequence
  Description of Artificial Sequence: Synthetic polypeptide
ELVVTQEPSLTVSPGGTVTLTCRSSTGAVTTSNYANWVQQKPGQAPRGLIGGTNKRAPGTPARFSGSLLGGKAALTLSGVQPEDEAEYYCALWYSNLWVFGGGTKLTVLGATPPETGAETESPGETTGGSAESEPPGEGEVQLLESGGGLVQPGGSLKLSCAASGFTFNTYAMNWVRQAPGKGLEWVARIRSKYNNYATYYADSVKDRFTISRDDSKNTAYLQMNNLKTEDTAVYYCVRHGNFGNSYVSWFAYWGQGTLVTVSS

SEQ ID NO: 782 - protein, 264 aa, Artificial Sequence
  Description of Artificial Sequence: Synthetic polypeptide
ELVVTQEPSLTVSPGGTVTLTCRSSTGAVTTSNYANWVQQKPGQAPRGLIGGTNKRAPGTPARFSGSSLGGSAALTLSGVQPEDEAEYYCALWYSNLWVFGGGTKLTVLGATPPETGAETESPGETTGGSAESEPPGEGEVQLQESGGGLVQPGGSLKLSCAASGFTFNTYAMNWVRQAPGKGLEWVARIRSKYNNYATYYADSVKDRFTISRDDSKNTAYLQMNNLKTEDTAVYYCVRHGNFGNSYVSWFAYWGQGTLVTVSS

SEQ ID NO: 783 - protein, 256 aa, Artificial Sequence
  Description of Artificial Sequence: Synthetic polypeptide
QSVLTQPPSASGTPGQRVTISCSGSSSNIGSNYVYWYQQLPGTAPKLLIYRNNQRPSGVPDRFSGSKSGTSASLAISGLRSEDEADYYCAAWDDSLSGLWVFGGGTKLTVLGATPPETGAETESPGETTGGSAESEPPGEGQVQLQQWGGGLVKPGGSLRLSCAASGFTFSSYSMNWVRQAPGKGLEWVSRINSDGSSTNYADSVKGRFTISRDNAKNTLYLQMNSLRAEDTAVYYCARELRWGNWGQGTLVTVSS

SEQ ID NO: 784 - protein, 255 aa, Artificial Sequence
  Description of Artificial Sequence: Synthetic polypeptide
QAGLTQPPSASGTPGQRVTLSCSGSYSNIGTYYVYWYQQLPGTAPKLLIYSNDQRLSGVPDRFSGSKSGTSASLAISGLQSEDEAAYYCAAWDDSLNGWAFGGGTKLTVLGATPPETGAETESPGETTGGSAESEPPGEGQVQLQQWGGGLVKPGGSLRLSCAASGFTFSSYSMNWVRQAPGKGLEWVSRINSDGSSTNYADSVKGRFTISRDNAKNTLYLQMNSLRAEDTAVYYCARELRWGNWGQGTLVTVSS

SEQ ID NO: 785 - protein, 255 aa, Artificial Sequence
  Description of Artificial Sequence: Synthetic polypeptide
QPGLTQPPSASGTPGQRVTLSCSGRSSNIGSYYVYWYQHLPGMAPKLLIYRNSRRPSGVPDRFSGSKSGTSASLVISGLQSDDEADYYCAAWDDSLKSWVFGGGTKLTVLGATPPETGAETESPGETTGGSAESEPPGEGQVQLQQWGGGLVKPGGSLRLSCAASGFTFSSYSMNWVRQAPGKGLEWVSRINSDGSSTNYADSVKGRFTISRDNAKNTLYLQMNSLRAEDTAVYYCARELRWGNWGQGTLVTVSS

SEQ ID NO: 786 - protein, 255 aa, Artificial Sequence
  Description of Artificial Sequence: Synthetic polypeptide
QSVLTQPPSASGTPGQRVTISCSGSSSNIGTNYVYWYQQFPGTAPKLLIYSNNQRPSGVPDRFSGSKSGTSGSLAISGLQSEDEADYSCAAWDDSLNGWVFGGGTKLTVLGATPPETGAETESPGETTGGSAESEPPGEGQVQLVQWGGGLVKPGGSLRLSCAASGFTFSSYSMNWVRQAPGKGLEWVSRINSDGSSTNYADSVKGRFTISRDNAKNTLYLQMNSLRAEDTAVYYCARELRWGNWGQGTLVTVSS

SEQ ID NO: 787 - protein, 255 aa, Artificial Sequence
  Description of Artificial Sequence: Synthetic polypeptide
QPGLTQPPSASGTPGQRVTISCSGSSSNIGSNYVYWYQQLPGTAPKLLIYRNNQRPSGVPDRLSGSKSGTSASLAISGLRSEDEADYYCAAWDDSLSGWVFGGGTKLTVLGATPPETGAETESPGETTGGSAESEPPGEGQVQLVQWGGGLVKPGGSLRLSCAASGFTFSSYSMNWVRQAPGKGLEWVSRINSDGSSTNYADSVKGRFTISRDNAKNTLYLQMNSLRAEDTAVYYCARELRWGNWGQGTLVTVSS

SEQ ID NO: 788 - protein, 256 aa, Artificial Sequence
  Description of Artificial Sequence: Synthetic polypeptide
QAVLTQPPSASGTPGQRVTISCSGSSSNIGSYYVYWYQQVPGAAPKLLMRLNNQRPSGVPDRFSGAKSGTSASLVISGLRSEDEADYYCAAWDDSLSGQWVFGGGTKLTVLGATPPETGAETESPGETTGGSAESEPPGEGQVQLQQWGGGLVKPGGSLRLSCAASGFTFSSYSMNWVRQAPGKGLEWVSRINSDGSSTNYADSVKGRFTISRDNAKNTLYLQMNSLRAEDTAVYYCARELRWGNWGQGTLVTVSS

SEQ ID NO: 789 - protein, 255 aa, Artificial Sequence
  Description of Artificial Sequence: Synthetic polypeptide
QAGLTQPPSASGTPGQRVTISCSGSSSNIGSNYVYWYQQLPGTAPKLLIYRNNQRPSGVPDRFSGSKSGTSASLAISGLRSEDEADYYCATWDASLSGWVFGGGTKLTVLGATPPETGAETESPGETTGGSAESEPPGEGEVQLVQWGGGLVKPGGSLRLSCAASGFTFSSYSMNWVRQAPGKGLEWVSRINSDGSSTNYADSVKGRFTISRDNAKNTLYLQMNSLRAEDTAVYYCARELRWGNWGQGTLVTVSS

SEQ ID NO: 790 - protein, 30 aa, Artificial Sequence
  Description of Artificial Sequence: Synthetic polypeptide
GSGEGSEGEGGGEGSEGEGSGEGGEGEGSG

SEQ ID NO: 791 - protein, 32 aa, Artificial Sequence
  Description of Artificial Sequence: Synthetic polypeptide
TGSGEGSEGEGGGEGSEGEGSGEGGEGEGSGT

SEQ ID NO: 792 - protein, 30 aa, Artificial Sequence
  Description of Artificial Sequence: Synthetic polypeptide
GATPPETGAETESPGETTGGSAESEPPGEG

SEQ ID NO: 793 - protein, 30 aa, Artificial Sequence
  Description of Artificial Sequence: Synthetic polypeptide
GSAAPTAGTTPSASPAPPTGGSSAAGSPST

SEQ ID NO: 794 - protein, 6 aa, Artificial Sequence
  Description of Artificial Sequence: Synthetic 6xHis tag
HHHHHH

SEQ ID NO: 795 - protein, 8 aa, Artificial Sequence
  Description of Artificial Sequence: Synthetic 8xHis tag
HHHHHHHH

SEQ ID NO: 796 - protein, 4 aa, Artificial Sequence
  Description of Artificial Sequence: Synthetic peptide
EPEA

SEQ ID NO: 797 - protein, 6 aa, Artificial Sequence
  Description of Artificial Sequence: Synthetic peptide
SGGGGS

SEQ ID NO: 798 - protein, 5 aa, Artificial Sequence
  Description of Artificial Sequence: Synthetic peptide
GGGGS

SEQ ID NO: 799 - protein, 6 aa, Artificial Sequence
  Description of Artificial Sequence: Synthetic peptide
GGSGGS

SEQ ID NO: 800 - DNA, 5235 bp, Artificial Sequence
  Description of Artificial Sequence: Synthetic polynucleotide
tccccagcaggcagcccgaccagcaccgaggagggtacgagcgagtcggctactccagagagcggtccgggtacctctacggaaccgtccgaaggtagcgctccaggcacgtctgaaagcgcgacgccggaaagcggtccaggcagcgagccggcgacctccggtagcgaaacgcctggtacctcggagtcagcgactccggaaagcggtccgggtagcgaacctgcaacgagcggtagcgagactccaggcactagcgaatccgcaactccggagtcgggtccgggcacctctacggagcctagcgagggctcagcaccaggtagccctgcaggttccccgacgtcaaccgaggaaggtacaagcgaaagcgccacccctgagtcgggccctggcagcgaaccggcaactagcggcagcgagactccgggtaccagcgagtctgctacgccagagagcggcccaggttcgccagcgggttcgccgactagcacggaggagggcagcccagcgggtagcccgaccagcactgaggagggtacgtccaccgaaccgagcgaaggtagcgcaccaggtacctccgagtctgccacccctgaatccggtccaggtaccagcgaatcagccaccccggagtcgggtccaggtacgagcgaatctgctaccccggaatccggcccaggcagcgaacctgctactagcggcagcgaaacgccgggcagcgaacctgccacgtcaggcagcgagacgccgggttcccctgcaggctccccgaccagcactgaggagggcacctccaccgaaccatcagaaggtagcgcgcctggtacgtcaaccgaaccttccgagggcagcgcaccgggtggctcagcgcctactacaggggaggcgggggaagcagcaggggcgacttctgctggggctaccggccccgctacctcaggctccgaaaccccgggcaccgatatccagatgacccagagcccttcttccctgtccgcatccgtcggcgatcgtgtcacgattacctgtcgcagcactaagagcctgctgcactcaaacggtatcacgtacctgtactggtaccagcagaagccgggcaaagcgccgaagctgctgatttatcagatgagcaacctggcatcgggcgtgccgagccgtttcagcagcagcggtagcggtaccgacttcacgctgaccatcagctcgttgcagccagaggactttgcgacgtactattgtgcgcaaaacttggaaattccgcgcaccttcggccagggtacgaaagttgagattaaaggtgccaccccaccggagactggtgcagaaaccgagtctccgggcgaaaccacgggcggtagcgcggagagcgaaccgcctggtgagggtcaagttcaattggttcagagcggtccgggtctggttcaaccgggcggcagcgtgcgcatttcttgtgcggccagcggttacacctttacgaactacggtatgaattgggtgaaacaagctccgggcaaaggtctggagtggatgggttggatcaatacctataccggtgaatccacttacgcggattcctttaagggccgtttcaccttcagcctggacacgagcgcgagcgctgcatatctgcaaatcaatagcctgcgtgccgaagataccgcggtgtactattgcgcgcgttttgcaatcaagggcgactattggggtcaaggcacgctgctgaccgtgagcagcggtggtggcggcagcgatatccaaatgacccaatccccatcctccctgtctgcaagcgttggtgatcgtgtgacgattacgtgccgtgcctcccaagatatccgtaactacctgaattggtatcagcagaaaccgggcaaggctccgaaattgctgatctactacaccagccgcctggagtcgggtgtgcctagccgcttcagcggcagcggttcgggtaccgactataccttgaccattagcagcctgcagccggaagatttcgcgacgtattactgccaacagggtaacacgctgccgtggacctttggccaaggtaccaaagtcgagattaagggtgcgaccccgccggaaaccggtgcggaaaccgagagcccgggtgaaacgactggcggctctgcagagagcgagccgccaggtgagggcgaagtccaactggtcgagtctggtggcggcctggtgcaaccgggtggcagcctgcgtctgagctgcgctgcgagcggctatagctttaccggttataccatgaactgggttcgccaggcaccgggtaagggtctggaatgggtggcgctgatcaatccgtacaaaggtgtgagcacttacaatcagaaattcaaagaccgtttcaccattagcgttgacaagagcaagaataccgcgtatctgcagatgaacagcttgcgcgccgaggatacggccgtttactactgtgcacgtagcggctattacggtgacagcgactggtactttgacgtctggggtcagggcacgctggtcaccgttagcagcggcaccgccgaagcagctagcgcctctggcacgactggtgaagccggagaggcagctggcgcgacctcagcgggggctactgggccttctccaggtagcccagctggtagcccaacctctaccgaagaaggtacctctgaatccgctactccagaatccggtcctggtactagcactgagccaagcgaaggttctgctccaggctccccggcaggtagccctacctctaccgaagagggcactagcaccgaaccatctgagggttccgctcctggcacctccactgaaccgtccgaaggcagtgctccgggtacttccgaaagcgcaactccggaatccggccctggttctgagcctgctacttccggctctgaaactccaggtagcgagccagcgacttctggttctgaaactccaggttcaccggcgggtagcccgacgagcacggaggaaggtacctctgagtcggccactcctgagtccggtccgggcacgagcaccgagccgagcgagggttcagccccgggtaccagcacggagccgtccgagggtagcgcaccgggttctccggcgggctcccctacgtctacggaagagggtacgtccactgaacctagcgagggcagcgcgccaggcaccagcactgaaccgagcgaaggcagcgcacctggcactagcgagtctgcgactccggagagcggtccgggtacgagcacggaaccaagcgaaggcagcgccccaggtacctctgaatctgctaccccagaatctggcccgggttccgagccagctacctctggttctgaaaccccaggtacttccactgaaccaagcgaaggtagcgctcctggcacttctactgaaccatccgaaggttccgctcctggtacgtctgaaagcgctacccctgaaagcggcccaggcacctctgaaagcgctactcctgagagcggtccaggctctccagcaggttctccaacctccactgaagaaggcacctctgagtctgctacccctgaatctggtcctggctccgaacctgctacctctggttccgaaactccaggtacctcggaatctgcgactccggaatctggcccgggcacgagcacggagccgtctgagggtagcgcaccaggtaccagcactgagccttctgagggctctgcaccgggtacctccacggaaccttcggaaggttctgcgccgggtacctccactgagccatccgagggttcagcaccaggtactagcacggaaccgtccgagggctctgcaccaggtacgagcaccgaaccgtcggagggtagcgctccaggtagcccagcgggctctccgacaagcaccgaagaaggcaccagcaccgagccgtccgaaggttccgcaccaggtacaagcgagagcgcgactcctgaatctggtccgggtagcgagcctgcaaccagcggttctgagacgccgggcacttccgaatctgcgaccccggagtccggtccaggttcagagccggcgacgagcggttcggaaacgccgggtacgtctgaatcagccacgccggagtctggtccgggtacctcgaccgaaccaagcgaaggttcggcaccgggtactagcgagagcgcaacccctgaaagcggtccgggcagcccggcaggttctccaaccagcaccgaagaaggttcccctgctggtagcccgacctctacggaggaaggtagccctgcaggttccccaacttctactgaggaaggtacttctgagtccgctaccccagaaagcggtcctggtacctccactgaaccgtctgaaggctctgcaccaggcacttctgagtctgctactccagaaagcggcccaggttctgaaccagcaacttctggctctgagactccaggcacttctgagtccgcaacgcctgaatccggtcctggttctgaaccagctacttccggcagcgaaaccccaggtacctctgagtctgcgactccagagtctggtcctggtacttccactgagcctagcgagggttccgcaccaggttctccggctggtagcccgaccagcacggaggagggtacgtctgaatctgcaacgccggaatcgggcccaggttcggagcctgcaacgtctggcagcgaaaccccgggtacctccgaatctgctacaccggaaagcggtcctggcagccctgctggttctccaacctctaccgaggagggttcaccggcaggtagcccgactagcactgaagaaggtactagcacggagccgagcgagggtagtgctccgggtacgagcgagagcgcaacgccagagagcggtccaggcaccagcgaatcggccacccctgagagcggcccaggtacttctgagagcgccactcctgaatccggccctggtagcgagccggcaacctccggctcagaaactcctggttcggaaccagcgaccagcggttctgaaactccgggtagcccggcaggcagcccaacgagcaccgaagagggtaccagcacggaaccgagcgagggttctgccccgggtacttccaccgaaccatcggagggctctgcacctggtagcgaacctgcgacgtctggttctgaaacgccgggtaccagcgaaagcgctaccccagaatccggtccgggcactagcaccgagccatcggagggctccgcaccaggtcaccatcatcaccatcac

SEQ ID NO: 801 - DNA, 4263 bp, Artificial Sequence
  Description of Artificial Sequence: Synthetic polynucleotide
gatatccagatgacacagagcccttctagcctgtctgcttctgtgggagatagagtgaccatcacgtgtcgcagtaccaagtccctcctgcatagcaacggcatcacatatctgtattggtatcagcaaaagccggggaaggctcctaaactgctgatctaccaaatgtctaatttagcctctggagttccttctagattctcaagctctggctctggcaccgattttacactgaccatctctagcctgcagcctgaggattttgccacctactattgcgcccagaacctggaaatcccaaggacatttggacagggcaccaaggtggagattaagggcgcgacccctcccgaaaccggcgcggagacagaaagtccaggcgagactacaggagggtcggctgagtcagaacctccgggcgaaggacaagtccagctcgtgcaatccgggccaggactagtgcaaccaggaggctctgtgagaatctcctgtgcggcctctggttatacctttactaattatgggatgaattgggtgaaacaggctcccggcaaggggctcgagtggatgggctggatcaacacatatacaggagagagcacctacgccgatagcttcaagggacgtttcactttcagtctggacacatctgcttctgctgcttatttacagatcaactccttacgggccgaagataccgcggtatattactgcgcacgcttcgccatcaaaggcgactactggggacagggtacacttttgactgtcagctcaggaggcggaggatctgaattagttgtgacccaagagccaagcctgactgtttctccaggcggcacagtgaccctgacttgcagatcaagtacaggagctgtgacaacctctaattacgcaaactgggtacagcaaaagcctggccaagcaccgcgtggacttattggcggcaccaacaaaagagctccaggaacaccagcccgcttctcaggtagcctgcttggcggaaaagctgccctgacattatctggagttcagcctgaggacgaggccgagtactattgcgcgctgtggtactctaatctgtgggtgtttggaggagggaccaaactgaccgtgctgggcgccacacctccagagactggtgccgaaaccgagagccccggggaaacaacgggtggtagcgctgagagcgaaccgcccggggaaggcgaggtccagttactggagtcgggaggcggcctcgtccagcctgggggaagcctcaaactttcttgcgctgctagcgggtttaccttcaacacttatgcaatgaactgggtacggcaagctcccggaaaagggttagagtgggtggctcgtatcaggtctaagtacaacaactatgcaacctactacgcggattcagtgaaggacagatttactatttcccgtgacgatagcaagaatacagcatatttgcagatgaacaatctgaagaccgaagacaccgcggtgtactattgcgtgagacacggaaattttgggaacagctatgtgagctggtttgcctattggggccagggtaccctcgttacagttagctcgggtaccgccgaggccgctagcgcctcaggagaggccggaagaagcgccaatcacacacctgctggattgactggccccccaggtagcccagctggtagcccaacctctaccgaagaaggtacctctgaatccgctactccagaatccggtcctggtactagcactgagccaagcgaaggttctgctccaggctccccggcaggtagccctacctctaccgaagagggcactagcaccgaaccatctgagggttccgctcctggcacctccactgaaccgtccgaaggcagtgctccgggtacttccgaaagcgcaactccggaatccggccctggttctgagcctgctacttccggctctgaaactccaggtagcgagccagcgacttctggttctgaaactccaggttcaccggcgggtagcccgacgagcacggaggaaggtacctctgagtcggccactcctgagtccggtccgggcacgagcaccgagccgagcgagggttcagccccgggtaccagcacggagccgtccgagggtagcgcaccgggttctccggcgggctcccctacgtctacggaagagggtacgtccactgaacctagcgagggcagcgcgccaggcaccagcactgaaccgagcgaaggcagcgcacctggcactagcgagtctgcgactccggagagcggtccgggtacgagcacggaaccaagcgaaggcagcgccccaggtacctctgaatctgctaccccagaatctggcccgggttccgagccagctacctctggttctgaaaccccaggtacttccactgaaccaagcgaaggtagcgctcctggcacttctactgaaccatccgaaggttccgctcctggtacgtctgaaagcgctacccctgaaagcggcccaggcacctctgaaagcgctactcctgagagcggtccaggctctccagcaggttctccaacctccactgaagaaggcacctctgagtctgctacccctgaatctggtcctggctccgaacctgctacctctggttccgaaactccaggtacctcggaatctgcgactccggaatctggcccgggcacgagcacggagccgtctgagggtagcgcaccaggtaccagcactgagccttctgagggctctgcaccgggtacctccacggaaccttcggaaggttctgcgccgggtacctccactgagccatccgagggttcagcaccaggtactagcacggaaccgtccgagggctctgcaccaggtacgagcaccgaaccgtcggagggtagcgctccaggtagcccagcgggctctccgacaagcaccgaagaaggcaccagcaccgagccgtccgaaggttccgcaccaggtacaagcgagagcgcgactcctgaatctggtccgggtagcgagcctgcaaccagcggttctgagacgccgggcacttccgaatctgcgaccccggagtccggtccaggttcagagccggcgacgagcggttcggaaacgccgggtacgtctgaatcagccacgccggagtctggtccgggtacctcgaccgaaccaagcgaaggttcggcaccgggtactagcgagagcgcaacccctgaaagcggtccgggcagcccggcaggttctccaaccagcaccgaagaaggttcccctgctggtagcccgacctctacggaggaaggtagccctgcaggttccccaacttctactgaggaaggtacttctgagtccgctaccccagaaagcggtcctggtacctccactgaaccgtctgaaggctctgcaccaggcacttctgagtctgctactccagaaagcggcccaggttctgaaccagcaacttctggctctgagactccaggcacttctgagtccgcaacgcctgaatccggtcctggttctgaaccagctacttccggcagcgaaaccccaggtacctctgagtctgcgactccagagtctggtcctggtacttccactgagcctagcgagggttccgcaccaggttctccggctggtagcccgaccagcacggaggagggtacgtctgaatctgcaacgccggaatcgggcccaggttcggagcctgcaacgtctggcagcgaaaccccgggtacctccgaatctgctacaccggaaagcggtcctggcagccctgctggttctccaacctctaccgaggagggttcaccggcaggtagcccgactagcactgaagaaggtactagcacggagccgagcgagggtagtgctccgggtacgagcgagagcgcaacgccagagagcggtccaggcaccagcgaatcggccacccctgagagcggcccaggtacttctgagagcgccactcctgaatccggccctggtagcgagccggcaacctccggctcagaaactcctggttcggaaccagcgaccagcggttctgaaactccgggtagcccggcaggcagcccaacgagcaccgaagagggtaccagcacggaaccgagcgagggttctgccccgggtacttccaccgaaccatcggagggctctgcacctggtagcgaacctgcgacgtctggttctgaaacgccgggtaccagcgaaagcgctaccccagaatccggtccgggcactagcaccgagccatcggagggcgccgcagaaccagaggcg

SEQ ID NO: 802 - DNA, 5247 bp, Artificial Sequence
  Description of Artificial Sequence: Synthetic polynucleotide
caccatcatcaccatcactccccagcaggcagcccgaccagcaccgaggagggtacgagcgagtcggctactccagagagcggtccgggtacctctacggaaccgtccgaaggtagcgctccaggcacgtctgaaagcgcgacgccggaaagcggtccaggcagcgagccggcgacctccggtagcgaaacgcctggtacctcggagtcagcgactccggaaagcggtccgggtagcgaacctgcaacgagcggtagcgagactccaggcactagcgaatccgcaactccggagtcgggtccgggcacctctacggagcctagcgagggctcagcaccaggtagccctgcaggttccccgacgtcaaccgaggaaggtacaagcgaaagcgccacccctgagtcgggccctggcagcgaaccggcaactagcggcagcgagactccgggtaccagcgagtctgctacgccagagagcggcccaggttcgccagcgggttcgccgactagcacggaggagggcagcccagcgggtagcccgaccagcactgaggagggtacgtccaccgaaccgagcgaaggtagcgcaccaggtacctccgagtctgccacccctgaatccggtccaggtaccagcgaatcagccaccccggagtcgggtccaggtacgagcgaatctgctaccccggaatccggcccaggcagcgaacctgctactagcggcagcgaaacgccgggcagcgaacctgccacgtcaggcagcgagacgccgggttcccctgcaggctccccgaccagcactgaggagggcacctccaccgaaccatcagaaggtagcgcgcctggtacgtcaaccgaaccttccgagggcagcgcaccgggtggctcagcgcctacgactggtgaagccggagaggcagctggtgctacaagcgccggcgctactgggcctgctaccagcggctctgagacccctggaacagacattcagatgactcagtctccgtcctccctgtctgcgagcgtgggcgaccgtgtgactattacctgtaaagcctcccaggacgtgtctatcggtgtggcatggtatcaacaaaagccgggtaaggcacctaaactgctgatctactccgcttcttaccgttacacgggcgttccgtcccgttttagcggttccggtagcggtactgattttaccctgactatttcctccctgcaaccagaagactttgcgacctattactgtcagcaatactatatttacccgtataccttcggccagggcactaaggttgaaattaaaggtgcaacgcctccggagactggtgctgaaactgagtccccgggcgagacgaccggtggctctgctgaatccgaaccaccgggcgaaggcgaggttcagctggtggagtctggcggcggtctggtacagccgggtggtagcctgcgtctgagctgcgcggcgtccggtttcactttcaccgattataccatggactgggttcgccaggcaccgggcaagggtctggaatgggtggcggacgtgaacccgaactccggtggttctatctacaaccagcgtttcaaaggtcgtttcacgctgagcgtagatcgtagcaaaaacactctgtacctgcagatgaactccctgcgcgcagaagacaccgcggtgtattactgtgcacgtaacctgggcccgtccttctatttcgactactggggtcaaggtactctggtaactgtttcctctggtggtggcggcagcgagttagttgtgacccaagagccgagcctgaccgttagcccgggtggtacggtcaccctgacgtgccgtagcagcaacggtgcggtcacgagcagcaactatgccaattgggtccagcagaaaccgggtcaagcaccgcgtggcctgatcggcggcaccaataaacgtgccccgggtactcctgcgcgtttctccggtagcctgctgggcggcaaagccgctctgaccctgagcggtgtccagccggaagatgaagcggtgtactactgcgcgctgtggtatccgaatctgtgggtttttggcggcggtaccaagctgaccgtattgggtgctacgccaccggagactggcgcagaaacggaaagcccgggtgagactacgggtggctctgcggagagcgaacctccgggtgagggtgaggtccaactgctggagtctggtggtggcattgttcaaccgggtggctcgttgaagctgagctgtgcagctagcggctttaccttcaacacctatgcgatgaattgggttcgtcaggcaccgggtaagggcctggaatgggtggcgcgtatccgctccaagtacaacaactacgcgacctactacgcggatagcgttaaagaccgcttcacgattagccgtgacgattccaagaatacggtgtatctgcaaatgaacaatctgaaaaccgaagataccgcggtgtattactgtgtgcgccacgaaaatttcggcaacagctacgtgagctggtttgcacattggggtcagggcaccctggttacggtgagctccggaacagccgaagccgctagcgcatccggtacgacaggagaggcaggggaggccgctggcgctaccagtgctggagccaccggtcctccaggcagccccgcggggagtcctacgagcactgaagaagggaccagtgagagcgccacacctgagagcggccctggaaccagcacggagccatccgaagggtcagcaccgggatctccggccggctctcccacgtcaaccgaagagggaacgagcactgagccctccgaggggagtgcgcctgggacatctacagagccatcagaaggcagtgctccgggtacttccgaaagcgcaactccggaatccggccctggttctgagcctgctacttccggctctgaaactccaggtagcgagccagcgacttctggttctgaaactccaggttcaccggcgggtagcccgacgagcacggaggaaggtacctctgagtcggccactcctgagtccggtccgggcacgagcaccgagccgagcgagggttcagccccgggtaccagcacggagccgtccgagggtagcgcaccgggttctccggcgggctcccctacgtctacggaagagggtacgtccactgaacctagcgagggcagcgcgccaggcaccagcactgaaccgagcgaaggcagcgcacctggcactagcgagtctgcgactccggagagcggtccgggtacgagcacggaaccaagcgaaggcagcgccccaggtacctctgaatctgctaccccagaatctggcccgggttccgagccagctacctctggttctgaaaccccaggtacttccactgaaccaagcgaaggtagcgctcctggcacttctactgaaccatccgaaggttccgctcctggtacgtctgaaagcgctacccctgaaagcggcccaggcacctctgaaagcgctactcctgagagcggtccaggctctccagcaggttctccaacctccactgaagaaggcacctctgagtctgctacccctgaatctggtcctggctccgaacctgctacctctggttccgaaactccaggtacctcggaatctgcgactccggaatctggcccgggcacgagcacggagccgtctgagggtagcgcaccaggtaccagcactgagccttctgagggctctgcaccgggtacctccacggaaccttcggaaggttctgcgccgggtacctccactgagccatccgagggttcagcaccaggtactagcacggaaccgtccgagggctctgcaccaggtacgagcaccgaaccgtcggagggtagcgctccaggtagcccagcgggctctccgacaagcaccgaagaaggcaccagcaccgagccgtccgaaggttccgcaccaggtacaagcgagagcgcgactcctgaatctggtccgggtagcgagcctgcaaccagcggttctgagacgccgggcacttccgaatctgcgaccccggagtccggtccaggttcagagccggcgacgagcggttcggaaacgccgggtacgtctgaatcagccacgccggagtctggtccgggtacctcgaccgaaccaagcgaaggttcggcaccgggtactagcgagagcgcaacccctgaaagcggtccgggcagcccggcaggttctccaaccagcaccgaagaaggttcccctgctggtagcccgacctctacggaggaaggtagccctgcaggttccccaacttctactgaggaaggtacttctgagtccgctaccccagaaagcggtcctggtacctccactgaaccgtctgaaggctctgcaccaggcacttctgagtctgctactccagaaagcggcccaggttctgaaccagcaacttctggctctgagactccaggcacttctgagtccgcaacgcctgaatccggtcctggttctgaaccagctacttccggcagcgaaaccccaggtacctctgagtctgcgactccagagtctggtcctggtacttccactgagcctagcgagggttccgcaccaggttctccggctggtagcccgaccagcacggaggagggtacgtctgaatctgcaacgccggaatcgggcccaggttcggagcctgcaacgtctggcagcgaaaccccgggtacctccgaatctgctacaccggaaagcggtcctggcagccctgctggttctccaacctctaccgaggagggttcaccggcaggtagcccgactagcactgaagaaggtactagcacggagccgagcgagggtagtgctccgggtacgagcgagagcgcaacgccagagagcggtccaggcaccagcgaatcggccacccctgagagcggcccaggtacttctgagagcgccactcctgaatccggccctggtagcgagccggcaacctccggctcagaaactcctggttcggaaccagcgaccagcggttctgaaactccgggtagcccggcaggcagcccaacgagcaccgaagagggtaccagcacggaaccgagcgagggttctgccccgggtacttccaccgaaccatcggagggctctgcacctggtagcgaacctgcgacgtctggttctgaaacgccgggtaccagcgaaagcgctaccccagaatccggtccgggcactagcaccgagccatcggagggcgccgcagaaccagaggcg

SEQ ID NO: 803 - DNA, 5145 bp, Artificial Sequence
  Description of Artificial Sequence: Synthetic polynucleotide
caccatcatcaccatcactccccagcaggcagcccgaccagcaccgaggagggtacgagcgagtcggctactccagagagcggtccgggtacctctacggaaccgtccgaaggtagcgctccaggcacgtctgaaagcgcgacgccggaaagcggtccaggcagcgagccggcgacctccggtagcgaaacgcctggtacctcggagtcagcgactccggaaagcggtccgggtagcgaacctgcaacgagcggtagcgagactccaggcactagcgaatccgcaactccggagtcgggtccgggcacctctacggagcctagcgagggctcagcaccaggtagccctgcaggttccccgacgtcaaccgaggaaggtacaagcgaaagcgccacccctgagtcgggccctggcagcgaaccggcaactagcggcagcgagactccgggtaccagcgagtctgctacgccagagagcggcccaggttcgccagcgggttcgccgactagcacggaggagggcagcccagcgggtagcccgaccagcactgaggagggtacgtccaccgaaccgagcgaaggtagcgcaccaggtacctccgagtctgccacccctgaatccggtccaggtaccagcgaatcagccaccccggagtcgggtccaggtacgagcgaatctgctaccccggaatccggcccaggcagcgaacctgctactagcggcagcgaaacgccgggcagcgaacctgccacgtcaggcagcgagacgccgggttcccctgcaggctccccgaccagcactgaggagggcacctccaccgaaccatcagaaggtagcgcgcctggtacgtcaaccgaaccttccgagggcagcgcaccgggtggctcagcgcctacgactggtgaagccggagaggcagctggtgctacaagcgccggcgctactgggcctgctaccagcggctctgagacccctggaacagacatacaaatgacccagtctccttcctccttaccagcgagcctgggtgaccgtgtaaccatcaattgtcaggcttctcaggacatcagcaactaccttaactggtaccagcagaaacctggaaaagcgcctaagctgctgatttattacactaataaactcgccgatggcgtcccctcgagattttctggttccggcagcggacgcgactccagcttcactatcagcagtctggaaagcgaagacataggcagttactactgtcagcagtactacaattatccttggacattcggtcctggaaccaagctcgaaattaagggcggaggaggctccgatatccagatgactcagtctccctcttccctgtcggcatcagtgggcgacagagtgaccatcacctgcagatccacaaagtctctgctgcactctaacggcattacttacttatattggtatcagcagaaacctggaaaggcacccaaattattgatctatcagatgtcaaatcttgcgagcggcgttccctccagatttagctcttccggctctggcactgattttactctgacaataagctcactgcagccagaggatttcgcgacctattactgtgctcagaacctcgaaattcctcggactttcggacagggaaccaaagtcgagatcaagggagctacacctcccgaaacaggagcagagacagagtcgcctggagagactaccgggggaagcgccgagtctgaacctcctggagagggacaggtgcaactggtgcagtctggaccagggttagtgcagcccggaggcagtgtgagaatctcttgtgctgcttctggctacaccttcaccaattacggcatgaactgggtgaagcaggcccctggaaaaggacttgagtggatgggctggatcaacacctatacaggggaaagcacctatgccgacagcttcaagggcagattcaccttcagcctggacacttcagcctccgctgcttatctgcagattaactctctaagggcagaggataccgccgtttattactgtgccaggtttgccatcaaaggcgattactggggacaaggcactctcctcactgtgagctctggaggaggaggatctgaagtgcaattggtggagagcggcgggggtctggtccagcctggcaagtctctgaagctgagctgtgaggcgagtggatttacctttagcggctatggaatgcactgggtgagacaagctcctggaagaggactggaatctgtggcctacatcacaagcagcagcatcaacatcaagtacgccgatgccgtgaagggcagatttacagtgagccgggataatgccaagaacctgctctttctccagatgaatatactgaaaagtgaggacacagccatgtactactgtgcccgtttcgactgggacaagaactattggggccagggaactatggtgaccgtgtctagcggaacagccgaagccgctagcgcatccggtacgacaggagaggcaggggaggccgctggcgctaccagtgctggagccaccggtcctccaggcagccccgcggggagtcctacgagcactgaagaagggaccagtgagagcgccacacctgagagcggccctggaaccagcacggagccatccgaagggtcagcaccgggatctccggccggctctcccacgtcaaccgaagagggaacgagcactgagccctccgaggggagtgcgcctgggacatctacagagccatcagaaggcagtgctccgggtacttccgaaagcgcaactccggaatccggccctggttctgagcctgctacttccggctctgaaactccaggtagcgagccagcgacttctggttctgaaactccaggttcaccggcgggtagcccgacgagcacggaggaaggtacctctgagtcggccactcctgagtccggtccgggcacgagcaccgagccgagcgagggttcagccccgggtaccagcacggagccgtccgagggtagcgcaccgggttctccggcgggctcccctacgtctacggaagagggtacgtccactgaacctagcgagggcagcgcgccaggcaccagcactgaaccgagcgaaggcagcgcacctggcactagcgagtctgcgactccggagagcggtccgggtacgagcacggaaccaagcgaaggcagcgccccaggtacctctgaatctgctaccccagaatctggcccgggttccgagccagctacctctggttctgaaaccccaggtacttccactgaaccaagcgaaggtagcgctcctggcacttctactgaaccatccgaaggttccgctcctggtacgtctgaaagcgctacccctgaaagcggcccaggcacctctgaaagcgctactcctgagagcggtccaggctctccagcaggttctccaacctccactgaagaaggcacctctgagtctgctacccctgaatctggtcctggctccgaacctgctacctctggttccgaaactccaggtacctcggaatctgcgactccggaatctggcccgggcacgagcacggagccgtctgagggtagcgcaccaggtaccagcactgagccttctgagggctctgcaccgggtacctccacggaaccttcggaaggttctgcgccgggtacctccactgagccatccgagggttcagcaccaggtactagcacggaaccgtccgagggctctgcaccaggtacgagcaccgaaccgtcggagggtagcgctccaggtagcccagcgggctctccgacaagcaccgaagaaggcaccagcaccgagccgtccgaaggttccgcaccaggtacaagcgagagcgcgactcctgaatctggtccgggtagcgagcctgcaaccagcggttctgagacgccgggcacttccgaatctgcgaccccggagtccggtccaggttcagagccggcgacgagcggttcggaaacgccgggtacgtctgaatcagccacgccggagtctggtccgggtacctcgaccgaaccaagcgaaggttcggcaccgggtactagcgagagcgcaacccctgaaagcggtccgggcagcccggcaggttctccaaccagcaccgaagaaggttcccctgctggtagcccgacctctacggaggaaggtagccctgcaggttccccaacttctactgaggaaggtacttctgagtccgctaccccagaaagcggtcctggtacctccactgaaccgtctgaaggctctgcaccaggcacttctgagtctgctactccagaaagcggcccaggttctgaaccagcaacttctggctctgagactccaggcacttctgagtccgcaacgcctgaatccggtcctggttctgaaccagctacttccggcagcgaaaccccaggtacctctgagtctgcgactccagagtctggtcctggtacttccactgagcctagcgagggttccgcaccaggttctccggctggtagcccgaccagcacggaggagggtacgtctgaatctgcaacgccggaatcgggcccaggttcggagcctgcaacgtctggcagcgaaaccccgggtacctccgaatctgctacaccggaaagcggtcctggcagccctgctggttctccaacctctaccgaggagggttcaccggcaggtagcccgactagcactgaagaaggtactagcacggagccgagcgagggtagtgctccgggtacgagcgagagcgcaacgccagagagcggtccaggcaccagcgaatcggccacccctgagagcggcccaggtacttctgagagcgccactcctgaatccggccctggtagcgagccggcaacctccggctcagaaactcctggttcggaaccagcgaccagcggttctgaaactccgggtagcccggcaggcagcccaacgagcaccgaagagggtaccagcacggaaccgagcgagggttctgccccgggtacttccaccgaaccatcggagggctctgcacctggtagcgaacctgcgacgtctggttctgaaacgccgggtaccagcgaaagcgctaccccagaatccggtccgggcactagcaccgagccatcggagggcgccgcagaaccagaggcg

SEQ ID NO: 804 - DNA, 5154 bp, Artificial Sequence
  Description of Artificial Sequence: Synthetic polynucleotide
caccatcatcaccatcactccccagcaggcagcccgaccagcaccgaggagggtacgagcgagtcggctactccagagagcggtccgggtacctctacggaaccgtccgaaggtagcgctccaggcacgtctgaaagcgcgacgccggaaagcggtccaggcagcgagccggcgacctccggtagcgaaacgcctggtacctcggagtcagcgactccggaaagcggtccgggtagcgaacctgcaacgagcggtagcgagactccaggcactagcgaatccgcaactccggagtcgggtccgggcacctctacggagcctagcgagggctcagcaccaggtagccctgcaggttccccgacgtcaaccgaggaaggtacaagcgaaagcgccacccctgagtcgggccctggcagcgaaccggcaactagcggcagcgagactccgggtaccagcgagtctgctacgccagagagcggcccaggttcgccagcgggttcgccgactagcacggaggagggcagcccagcgggtagcccgaccagcactgaggagggtacgtccaccgaaccgagcgaaggtagcgcaccaggtacctccgagtctgccacccctgaatccggtccaggtaccagcgaatcagccaccccggagtcgggtccaggtacgagcgaatctgctaccccggaatccggcccaggcagcgaacctgctactagcggcagcgaaacgccgggcagcgaacctgccacgtcaggcagcgagacgccgggttcccctgcaggctccccgaccagcactgaggagggcacctccaccgaaccatcagaaggtagcgcgcctggtacgtcaaccgaaccttccgagggcagcgcaccgggtggctcagcgcctgaggcaggtcgttctgctaaccatacccctgcaggattaactggccccgccaccagcgggagcgagacccccgggactgagttagttgttacacaggagccttccctgaccgtttcacccggggggacggtgacgctgacctgcagatctagcacaggagctgtgaccaccagcaattacgccaattgggtgcagcagaaaccgggacaagcaccgcgtggactgattggcggcaccaacaaacgggcccccggcacacccgcccgctttagcggctctctgttaggcggaaaagctgccctgaccttatctggagttcagcctgaagacgaagcagaatactattgcgcactttggtacagcaacctgtgggtgtttggcggtggcacgaagctcactgtcctaggcggcgggggcagcgacatccaaatgacccaatccccttcttctctgtctgcctctgtcggtgaccgagtgaccatcacctgtcaagcttctcaagatatatctaattacctgaactggtatcagcagaagcccggcaaagcccctaaactgctgatctacgatgccagcaatctggaaacaggagttcctagcagattttcgggttcaggctctggaaccgatttcacattcaccatcagctctttacagccagaggacattgctacctacttctgccagcacttcgaccacctgcctctggccttcggcggagggacaaaggtggagatcaaaggagctacaccacccgaaacaggagccgagacagaatcacccggcgaaactactggcggatccgccgagtccgagccgcctggggaaggacaagtgcagctacaagagtccgggccagggcttgtgaagccatctgaaaccctcagtttgacatgcacagtgtctggcggaagtgtatcttccggcgactactactggacatggatccgacaaagccctggaaaggggttagagtggatcggacatatctactacagcggcaataccaactataatcctagcctgaagtctagactgaccatctctatcgatacatcgaaaacccagttcagcctgaaactcagctcagtcaccgcggctgataccgcgatatactattgcgtgcgtgaccgggttacaggcgcctttgatatctggggacagggaaccatggttaccgtgtcctcaggcggaggaggaagtgaagtgcagcttctagagtccggaggtggcttggtgcagcctggtggatccttgaaactgagttgcgccgctagcggcttcacctttaacacctacgccatgaactgggtccggcaagcacctggcaagggattggaatgggtggccagaattcggtcaaagtacaacaactacgccacctactacgccgactctgtgaaggaccgcttcacaatttccagggatgattctaaaaatacagcctacctgcagatgaacaacctgaagaccgaagataccgcggtgtattactgtgtgcgtcacggcaattttggcaacagctatgtgagctggtttgcctattggggccaaggtacgctcgtgaccgtttcctctgggactgctgaggcggctagcgcctccggagaagctggaagaagcgccaatcacacaccagctggacttacaggcccgcctggtagccccgcggggagccctacaagcactgaggagggcacatctgagtccgctacccctgagagtggacccgggacaagcactgagcctagcgaaggaagcgcaccaggttcccccgctgggagccccacaagcacagaagagggaacttctaccgagccctctgagggctcagcccctggaactagcacagagccctccgaaggcagtgcaccgggtacttccgaaagcgcaactccggaatccggccctggttctgagcctgctacttccggctctgaaactccaggtagcgagccagcgacttctggttctgaaactccaggttcaccggcgggtagcccgacgagcacggaggaaggtacctctgagtcggccactcctgagtccggtccgggcacgagcaccgagccgagcgagggttcagccccgggtaccagcacggagccgtccgagggtagcgcaccgggttctccggcgggctcccctacgtctacggaagagggtacgtccactgaacctagcgagggcagcgcgccaggcaccagcactgaaccgagcgaaggcagcgcacctggcactagcgagtctgcgactccggagagcggtccgggtacgagcacggaaccaagcgaaggcagcgccccaggtacctctgaatctgctaccccagaatctggcccgggttccgagccagctacctctggttctgaaaccccaggtacttccactgaaccaagcgaaggtagcgctcctggcacttctactgaaccatccgaaggttccgctcctggtacgtctgaaagcgctacccctgaaagcggcccaggcacctctgaaagcgctactcctgagagcggtccaggctctccagcaggttctccaacctccactgaagaaggcacctctgagtctgctacccctgaatctggtcctggctccgaacctgctacctctggttccgaaactccaggtacctcggaatctgcgactccggaatctggcccgggcacgagcacggagccgtctgagggtagcgcaccaggtaccagcactgagccttctgagggctctgcaccgggtacctccacggaaccttcggaaggttctgcgccgggtacctccactgagccatccgagggttcagcaccaggtactagcacggaaccgtccgagggctctgcaccaggtacgagcaccgaaccgtcggagggtagcgctccaggtagcccagcgggctctccgacaagcaccgaagaaggcaccagcaccgagccgtccgaaggttccgcaccaggtacaagcgagagcgcgactcctgaatctggtccgggtagcgagcctgcaaccagcggttctgagacgccgggcacttccgaatctgcgaccccggagtccggtccaggttcagagccggcgacgagcggttcggaaacgccgggtacgtctgaatcagccacgccggagtctggtccgggtacctcgaccgaaccaagcgaaggttcggcaccgggtactagcgagagcgcaacccctgaaagcggtccgggcagcccggcaggttctccaaccagcaccgaagaaggttcccctgctggtagcccgacctctacggaggaaggtagccctgcaggttccccaacttctactgaggaaggtacttctgagtccgctaccccagaaagcggtcctggtacctccactgaaccgtctgaaggctctgcaccaggcacttctgagtctgctactccagaaagcggcccaggttctgaaccagcaacttctggctctgagactccaggcacttctgagtccgcaacgcctgaatccggtcctggttctgaaccagctacttccggcagcgaaaccccaggtacctctgagtctgcgactccagagtctggtcctggtacttccactgagcctagcgagggttccgcaccaggttctccggctggtagcccgaccagcacggaggagggtacgtctgaatctgcaacgccggaatcgggcccaggttcggagcctgcaacgtctggcagcgaaaccccgggtacctccgaatctgctacaccggaaagcggtcctggcagccctgctggttctccaacctctaccgaggagggttcaccggcaggtagcccgactagcactgaagaaggtactagcacggagccgagcgagggtagtgctccgggtacgagcgagagcgcaacgccagagagcggtccaggcaccagcgaatcggccacccctgagagcggcccaggtacttctgagagcgccactcctgaatccggccctggtagcgagccggcaacctccggctcagaaactcctggttcggaaccagcgaccagcggttctgaaactccgggtagcccggcaggcagcccaacgagcaccgaagagggtaccagcacggaaccgagcgagggttctgccccgggtacttccaccgaaccatcggagggctctgcacctggtagcgaacctgcgacgtctggttctgaaacgccgggtaccagcgaaagcgctaccccagaatccggtccgggcactagcaccgagccatcggagggcgccgcagaaccagaggcg

SEQ ID NO: 805 - DNA, 4266 bp, Artificial Sequence
  Description of Artificial Sequence: Synthetic polynucleotide
gatattcagatgacccaatcgccgtcgtccctgtcagcttcagtcggtgatcgtgttaccattacctgtcgctcaacgaaatccctgctgcattcaaacggtattacctatctgtactggtatcagcaaaaaccgggcaaagcgccgaaactgctgatctaccagatgtcgaatctggccagcggtgttccgtctcgttttagctctagtggttctggcaccgatttcaccctgacgatttcctcactgcaaccggaagactttgcaacgtattactgcgctcagaacctggaaatcccgcgtaccttcggtcaaggcacgaaagtcgaaattaaaggtgcaacgcctccggagactggtgctgaaactgagtccccgggcgagacgaccggtggctctgctgaatccgaaccaccgggcgaaggccaagtgcaactggttcagagcggtccgggtctggtccaaccgggtggcagtgtgcgtatttcctgcgcggcctcaggttacacctttacgaactatggcatgaattgggtgaaacaggccccgggtaaaggcctggaatggatgggttggatcaacacctacacgggcgaatctacctatgcagatagtttcaaaggccgctttaccttcagcctggacacgtctgctagtgcagcttatctgcagattaatagcctgcgtgcggaagatacggccgtttattactgtgcgcgctttgcaatcaaaggcgactactggggccaaggcaccctgctgaccgtgtcctccggtggtggcggcagcgacatccaaatgacccagagcccgagcagcctgagcgcgagcgtgggcgaccgtgttaccatcacctgccgtgcgagccaagacatccgtaactacctgaactggtatcagcaaaagccgggtaaagcgccgaagctgctgatctactataccagccgtctggagagcggcgtgccgagccgtttcagcggtagcggtagcggtaccgactacaccctgaccattagcagcctgcagccggaagatttcgcgacctactattgccagcagggtaacaccctgccgtggacctttggtcaaggcaccaaagttgagattaaaggcgccacgcctccggaaactggtgctgagacggaatcccctggtgaaaccactggcggttctgccgaatctgaaccgcctggtgaaggcgaggtgcagctggttgaaagcggtggcggtctggtgcaaccaggcggtagcctgcgtctgagctgcgcggcgagcggttacagctttaccggttataccatgaactgggttcgtcaagcgccaggtaaaggtctggagtgggtggcgctgatcaacccgtacaagggtgttagcacctataaccagaagttcaaagaccgttttaccattagcgtggataagagcaaaaacaccgcgtacctgcaaatgaacagcctgcgtgcggaggacaccgctgtgtactattgcgcgcgtagcggttactatggcgacagcgactggtattttgatgtgtggggccaaggcaccctggttaccgtgagctccggcaccgccgaagcagctagcgcctctggcgaaaatctgtattttcagggtgcatcttgcggcccactgggtctggctgggtctccaggtagcccagctggtagcccaacctctaccgaagaaggtacctctgaatccgctactccagaatccggtcctggtactagcactgagccaagcgaaggttctgctccaggctccccggcaggtagccctacctctaccgaagagggcactagcaccgaaccatctgagggttccgctcctggcacctccactgaaccgtccgaaggcagtgctccgggtacttccgaaagcgcaactccggaatccggccctggttctgagcctgctacttccggctctgaaactccaggtagcgagccagcgacttctggttctgaaactccaggttcaccggcgggtagcccgacgagcacggaggaaggtacctctgagtcggccactcctgagtccggtccgggcacgagcaccgagccgagcgagggttcagccccgggtaccagcacggagccgtccgagggtagcgcaccgggttctccggcgggctcccctacgtctacggaagagggtacgtccactgaacctagcgagggcagcgcgccaggcaccagcactgaaccgagcgaaggcagcgcacctggcactagcgagtctgcgactccggagagcggtccgggtacgagcacggaaccaagcgaaggcagcgccccaggtacctctgaatctgctaccccagaatctggcccgggttccgagccagctacctctggttctgaaaccccaggtacttccactgaaccaagcgaaggtagcgctcctggcacttctactgaaccatccgaaggttccgctcctggtacgtctgaaagcgctacccctgaaagcggcccaggcacctctgaaagcgctactcctgagagcggtccaggctctccagcaggttctccaacctccactgaagaaggcacctctgagtctgctacccctgaatctggtcctggctccgaacctgctacctctggttccgaaactccaggtacctcggaatctgcgactccggaatctggcccgggcacgagcacggagccgtctgagggtagcgcaccaggtaccagcactgagccttctgagggctctgcaccgggtacctccacggaaccttcggaaggttctgcgccgggtacctccactgagccatccgagggttcagcaccaggtactagcacggaaccgtccgagggctctgcaccaggtacgagcaccgaaccgtcggagggtagcgctccaggtagcccagcgggctctccgacaagcaccgaagaaggcaccagcaccgagccgtccgaaggttccgcaccaggtacaagcgagagcgcgactcctgaatctggtccgggtagcgagcctgcaaccagcggttctgagacgccgggcacttccgaatctgcgaccccggagtccggtccaggttcagagccggcgacgagcggttcggaaacgccgggtacgtctgaatcagccacgccggagtctggtccgggtacctcgaccgaaccaagcgaaggttcggcaccgggtactagcgagagcgcaacccctgaaagcggtccgggcagcccggcaggttctccaaccagcaccgaagaaggttcccctgctggtagcccgacctctacggaggaaggtagccctgcaggttccccaacttctactgaggaaggtacttctgagtccgctaccccagaaagcggtcctggtacctccactgaaccgtctgaaggctctgcaccaggcacttctgagtctgctactccagaaagcggcccaggttctgaaccagcaacttctggctctgagactccaggcacttctgagtccgcaacgcctgaatccggtcctggttctgaaccagctacttccggcagcgaaaccccaggtacctctgagtctgcgactccagagtctggtcctggtacttccactgagcctagcgagggttccgcaccaggttctccggctggtagcccgaccagcacggaggagggtacgtctgaatctgcaacgccggaatcgggcccaggttcggagcctgcaacgtctggcagcgaaaccccgggtacctccgaatctgctacaccggaaagcggtcctggcagccctgctggttctccaacctctaccgaggagggttcaccggcaggtagcccgactagcactgaagaaggtactagcacggagccgagcgagggtagtgctccgggtacgagcgagagcgcaacgccagagagcggtccaggcaccagcgaatcggccacccctgagagcggcccaggtacttctgagagcgccactcctgaatccggccctggtagcgagccggcaacctccggctcagaaactcctggttcggaaccagcgaccagcggttctgaaactccgggtagcccggcaggcagcccaacgagcaccgaagagggtaccagcacggaaccgagcgagggttctgccccgggtacttccaccgaaccatcggagggctctgcacctggtagcgaacctgcgacgtctggttctgaaacgccgggtaccagcgaaagcgctaccccagaatccggtccgggcactagcaccgagccatcggagggctccgcaccaggtcaccatcatcaccatcac

SEQ ID NO: 806 - DNA, 3069 bp, Artificial Sequence
  Description of Artificial Sequence: Synthetic polynucleotide
caccatcatcaccatcacggttctccggcgggtagcccaactagcaccgaggaaggtactagcgagagcgcaacgccggagtccggtccgggtacgtctacagaacctagcgagggttctgctccgggctctccagcaggctccccgacgagcaccgaggaaggcacttcgaccgagcctagcgagggtagcgcgcctggcaccagcaccgaaccgagcgagggtagcgctccgggcacctctgaaagcgcaaccccagaatccggcccaggctctgagccggcgactagcggttccgagactccgggctcggaaccggcgacgtccggcagcgaaacgccaggttcccctgccggttcgcctaccagcacggaagagggcacttcagagagtgcgacgccagagtcgggtcctggtaccagtaccgagccgagcgagggctcagcgcctgaagccggagaggcagctggtgctacaagcgccggcgctactgggcctgctaccagcggctctgagacccctggaacagacattcagatgactcagtctccgtcctccctgtctgcgagcgtgggcgaccgtgtgactattacctgtaaagcctcccaggacgtgtctatcggtgtggcatggtatcaacaaaagccgggtaaggcacctaaactgctgatctactccgcttcttaccgttacacgggcgttccgtcccgttttagcggttccggtagcggtactgattttaccctgactatttcctccctgcaaccagaagactttgcgacctattactgtcagcaatactatatttacccgtataccttcggccagggcactaaggttgaaattaaaggtgcaacgcctccggagactggtgctgaaactgagtccccgggcgagacgaccggtggctctgctgaatccgaaccaccgggcgaaggcgaggttcagctggtggagtctggcggcggtctggtacagccgggtggtagcctgcgtctgagctgcgcggcgtccggtttcactttcaccgattataccatggactgggttcgccaggcaccgggcaagggtctggaatgggtggcggacgtgaacccgaactccggtggttctatctacaaccagcgtttcaaaggtcgtttcacgctgagcgtagatcgtagcaaaaacactctgtacctgcagatgaactccctgcgcgcagaagacaccgcggtgtattactgtgcacgtaacctgggcccgtccttctatttcgactactggggtcaaggtactctggtaactgtttcctctggtggtggcggcagcgagttagttgtgacccaagagccgagcctgaccgttagcccgggtggtacggtcaccctgacgtgccgtagcagcaacggtgcggtcacgagcagcaactatgccaattgggtccagcagaaaccgggtcaagcaccgcgtggcctgatcggcggcaccaataaacgtgccccgggtactcctgcgcgtttctccggtagcctgctgggcggcaaagccgctctgaccctgagcggtgtccagccggaagatgaagcggtgtactactgcgcgctgtggtatccgaatctgtgggtttttggcggcggtaccaagctgaccgtattgggtgctacgccaccggagactggcgcagaaacggaaagcccgggtgagactacgggtggctctgcggagagcgaacctccgggtgagggtgaggtccaactgctggagtctggtggtggcattgttcaaccgggtggctcgttgaagctgagctgtgcagctagcggctttaccttcaacacctatgcgatgaattgggttcgtcaggcaccgggtaagggcctggaatgggtggcgcgtatccgctccaagtacaacaactacgcgacctactacgcggatagcgttaaagaccgcttcacgattagccgtgacgattccaagaatacggtgtatctgcaaatgaacaatctgaaaaccgaagataccgcggtgtattactgtgtgcgccacgaaaatttcggcaacagctacgtgagctggtttgcacattggggtcagggcaccctggttacggtgagctccggaacagccgaagccgctagcgcatccggtacgacaggagaggcaggggaggccgctggcgctaccagtgctggagccaccggtcctccaggcagccccgcggggagtcctacgagcactgaagaagggaccagtgagagcgccacacctgagagcggccctggaaccagcacggagccatccgaagggtcagcaccgggatctccggccggctctcccacgtcaaccgaagagggaacgagcactgagccctccgaggggagtgcgcctgggacatctacagagccatcagaaggcagtgctccgggtacttccgaaagcgcaactccggaatccggccctggttctgagcctgctacttccggctctgaaactccaggtagcgagccagcgacttctggttctgaaactccaggttcaccggcgggtagcccgacgagcacggaggaaggtacctctgagtcggccactcctgagtccggtccgggcacgagcaccgagccgagcgagggttcagccccgggtaccagcacggagccgtccgagggtagcgcaccgggttctccggcgggctcccctacgtctacggaagagggtacgtccactgaacctagcgagggcagcgcgccaggcaccagcactgaaccgagcgaaggcagcgcacctggcactagcgagtctgcgactccggagagcggtccgggtacgagcacggaaccaagcgaaggcagcgccccaggtacctctgaatctgctaccccagaatctggcccgggttccgagccagctacctctggttctgaaaccccaggtacttccactgaaccaagcgaaggtagcgctcctggcacttctactgaaccatccgaaggttccgctcctggtacgtctgaaagcgctacccctgaaagcggcccaggcacctctgaaagcgctactcctgagggcgccgcagaaccagaggcg

SEQ ID NO: 807 - DNA, 4275 bp, Artificial Sequence
  Description of Artificial Sequence: Synthetic polynucleotide
gatatccagatgacccagagcccttcttccctgtccgcatccgtcggcgatcgtgtcacgattacctgtcgcagcactaagagcctgctgcactcaaacggtatcacgtacctgtactggtaccagcagaagccgggcaaagcgccgaagctgctgatttatcagatgagcaacctggcatcgggcgtgccgagccgtttcagcagcagcggtagcggtaccgacttcacgctgaccatcagctcgttgcagccagaggactttgcgacgtactattgtgcgcaaaacttggaaattccgcgcaccttcggccagggtacgaaagttgagattaaaggtgccaccccaccggagactggtgcagaaaccgagtctccgggcgaaaccacgggcggtagcgcggagagcgaaccgcctggtgagggtcaagttcaattggttcagagcggtccgggtctggttcaaccgggcggcagcgtgcgcatttcttgtgcggccagcggttacacctttacgaactacggtatgaattgggtgaaacaagctccgggcaaaggtctggagtggatgggttggatcaatacctataccggtgaatccacttacgcggattcctttaagggccgtttcaccttcagcctggacacgagcgcgagcgctgcatatctgcaaatcaatagcctgcgtgccgaagataccgcggtgtactattgcgcgcgttttgcaatcaagggcgactattggggtcaaggcacgctgctgaccgtgtcctcaggtggtggcggcagcgagttagttgtgacccaagagccgagcctgaccgttagcccgggtggtacggtcaccctgacgtgccgtagcagcaacggtgcggtcacgagcagcaactatgccaattgggtccagcagaaaccgggtcaagcaccgcgtggcctgatcggcggcaccaataaacgtgccccgggtactcctgcgcgtttctccggtagcctgctgggcggcaaagccgctctgaccctgagcggtgtccagccggaagatgaagcggtgtactactgcgcgctgtggtatccgaatctgtgggtttttggcggcggtaccaagctgaccgtattgggtgctacgccaccggagactggcgcagaaacggaaagcccgggtgagactacgggtggctctgcggagagcgaacctccgggtgagggtgaggtccaactgctggagtctggtggtggcattgttcaaccgggtggctcgttgaagctgagctgtgcagctagcggctttaccttcaacacctatgcgatgaattgggttcgtcaggcaccgggtaagggcctggaatgggtggcgcgtatccgctccaagtacaacaactacgcgacctactacgcggatagcgttaaagaccgcttcacgattagccgtgacgattccaagaatacggtgtatctgcaaatgaacaatctgaaaaccgaagataccgcggtgtattactgtgtgcgccacgaaaatttcggcaacagctacgtgagctggtttgcacattggggtcagggcaccctggttacggtgagctccggcaccgccgaagcagctagcgcctctggcgaatctggtcgtgcagctaacaccgctccagagggtctgactgggcctccaggtagcccagctggtagcccaacctctaccgaagaaggtacctctgaatccgctactccagaatccggtcctggtactagcactgagccaagcgaaggttctgctccaggctccccggcaggtagccctacctctaccgaagagggcactagcaccgaaccatctgagggttccgctcctggcacctccactgaaccgtccgaaggcagtgctccgggtacttccgaaagcgcaactccggaatccggccctggttctgagcctgctacttccggctctgaaactccaggtagcgagccagcgacttctggttctgaaactccaggttcaccggcgggtagcccgacgagcacggaggaaggtacctctgagtcggccactcctgagtccggtccgggcacgagcaccgagccgagcgagggttcagccccgggtaccagcacggagccgtccgagggtagcgcaccgggttctccggcgggctcccctacgtctacggaagagggtacgtccactgaacctagcgagggcagcgcgccaggcaccagcactgaaccgagcgaaggcagcgcacctggcactagcgagtctgcgactccggagagcggtccgggtacgagcacggaaccaagcgaaggcagcgccccaggtacctctgaatctgctaccccagaatctggcccgggttccgagccagctacctctggttctgaaaccccaggtacttccactgaaccaagcgaaggtagcgctcctggcacttctactgaaccatccgaaggttccgctcctggtacgtctgaaagcgctacccctgaaagcggcccaggcacctctgaaagcgctactcctgagagcggtccaggctctccagcaggttctccaacctccactgaagaaggcacctctgagtctgctacccctgaatctggtcctggctccgaacctgctacctctggttccgaaactccaggtacctcggaatctgcgactccggaatctggcccgggcacgagcacggagccgtctgagggtagcgcaccaggtaccagcactgagccttctgagggctctgcaccgggtacctccacggaaccttcggaaggttctgcgccgggtacctccactgagccatccgagggttcagcaccaggtactagcacggaaccgtccgagggctctgcaccaggtacgagcaccgaaccgtcggagggtagcgctccaggtagcccagcgggctctccgacaagcaccgaagaaggcaccagcaccgagccgtccgaaggttccgcaccaggtacaagcgagagcgcgactcctgaatctggtccgggtagcgagcctgcaaccagcggttctgagacgccgggcacttccgaatctgcgaccccggagtccggtccaggttcagagccggcgacgagcggttcggaaacgccgggtacgtctgaatcagccacgccggagtctggtccgggtacctcgaccgaaccaagcgaaggttcggcaccgggtactagcgagagcgcaacccctgaaagcggtccgggcagcccggcaggttctccaaccagcaccgaagaaggttcccctgctggtagcccgacctctacggaggaaggtagccctgcaggttccccaacttctactgaggaaggtacttctgagtccgctaccccagaaagcggtcctggtacctccactgaaccgtctgaaggctctgcaccaggcacttctgagtctgctactccagaaagcggcccaggttctgaaccagcaacttctggctctgagactccaggcacttctgagtccgcaacgcctgaatccggtcctggttctgaaccagctacttccggcagcgaaaccccaggtacctctgagtctgcgactccagagtctggtcctggtacttccactgagcctagcgagggttccgcaccaggttctccggctggtagcccgaccagcacggaggagggtacgtctgaatctgcaacgccggaatcgggcccaggttcggagcctgcaacgtctggcagcgaaaccccgggtacctccgaatctgctacaccggaaagcggtcctggcagccctgctggttctccaacctctaccgaggagggttcaccggcaggtagcccgactagcactgaagaaggtactagcacggagccgagcgagggtagtgctccgggtacgagcgagagcgcaacgccagagagcggtccaggcaccagcgaatcggccacccctgagagcggcccaggtacttctgagagcgccactcctgaatccggccctggtagcgagccggcaacctccggctcagaaactcctggttcggaaccagcgaccagcggttctgaaactccgggtagcccggcaggcagcccaacgagcaccgaagagggtaccagcacggaaccgagcgagggttctgccccgggtacttccaccgaaccatcggagggctctgcacctggtagcgaacctgcgacgtctggttctgaaacgccgggtaccagcgaaagcgctaccccagaatccggtccgggcactagcaccgagccatcggagggctccgcaccaggtcaccatcatcaccatcac

SEQ ID NO: 808 - DNA, 4275 bp, Artificial Sequence
  Description of Artificial Sequence: Synthetic polynucleotide
gatatccagatgacccagagcccttcttccctgtccgcatccgtcggcgatcgtgtcacgattacctgtcgcagcactaagagcctgctgcactcaaacggtatcacgtacctgtactggtaccagcagaagccgggcaaagcgccgaagctgctgatttatcagatgagcaacctggcatcgggcgtgccgagccgtttcagcagcagcggtagcggtaccgacttcacgctgaccatcagctcgttgcagccagaggactttgcgacgtactattgtgcgcaaaacttggaaattccgcgcaccttcggccagggtacgaaagttgagattaaaggtgccaccccaccggagactggtgcagaaaccgagtctccgggcgaaaccacgggcggtagcgcggagagcgaaccgcctggtgagggtcaagttcaattggttcagagcggtccgggtctggttcaaccgggcggcagcgtgcgcatttcttgtgcggccagcggttacacctttacgaactacggtatgaattgggtgaaacaagctccgggcaaaggtctggagtggatgggttggatcaatacctataccggtgaatccacttacgcggattcctttaagggccgtttcaccttcagcctggacacgagcgcgagcgctgcatatctgcaaatcaatagcctgcgtgccgaagataccgcggtgtactattgcgcgcgttttgcaatcaagggcgactattggggtcaaggcacgctgctgaccgtgtcctcaggtggtggcggcagcgagttagttgtgacccaagagccgagcctgaccgttagcccgggtggtacggtcaccctgacgtgccgtagcagcaacggtgaagtcacgaccagcaactatgccaattgggtccagcagaaaccgggtcaagcaccgcgtggcctgatcggcggcaccattaaacgtgccccgggtactcctgcgcgtttctccggtagcctgctgggcggcaaagccgctctgaccctgagcggtgtccagccggaagatgaagcggtgtactactgcgcgctgtggtatccgaatctgtgggtttttggcggcggtaccaagctgaccgtattgggtgctacgccaccggagactggcgcagaaacggaaagcccgggtgagactacgggtggctctgcggagagcgaacctccgggtgagggtgaggtccaactgctggagtctggtggtggcattgttcaaccgggtggctcgttgaagctgagctgtgcagctagcggctttaccttcaacacctatgcgatgaattgggttcgtcaggcaccgggtaagggcctggaatgggtggcgcgtatccgctccaagtacaacaactacgcgacctactacgcggatagcgttaaagaccgcttcacgattagccgtgacgattccaagaatacggtgtatctgcaaatgaacaatctgaaaaccgaagataccgcggtgtattactgtgtgcgccacgaaaatttcggcaacagctacgtgagctggtttgcacattggggtcagggcaccctggttacggtgagctccggcaccgccgaagcagctagcgcctctggcgaatctggtcgtgcagctaacaccgctccagagggtctgactgggcctccaggtagcccagctggtagcccaacctctaccgaagaaggtacctctgaatccgctactccagaatccggtcctggtactagcactgagccaagcgaaggttctgctccaggctccccggcaggtagccctacctctaccgaagagggcactagcaccgaaccatctgagggttccgctcctggcacctccactgaaccgtccgaaggcagtgctccgggtacttccgaaagcgcaactccggaatccggccctggttctgagcctgctacttccggctctgaaactccaggtagcgagccagcgacttctggttctgaaactccaggttcaccggcgggtagcccgacgagcacggaggaaggtacctctgagtcggccactcctgagtccggtccgggcacgagcaccgagccgagcgagggttcagccccgggtaccagcacggagccgtccgagggtagcgcaccgggttctccggcgggctcccctacgtctacggaagagggtacgtccactgaacctagcgagggcagcgcgccaggcaccagcactgaaccgagcgaaggcagcgcacctggcactagcgagtctgcgactccggagagcggtccgggtacgagcacggaaccaagcgaaggcagcgccccaggtacctctgaatctgctaccccagaatctggcccgggttccgagccagctacctctggttctgaaaccccaggtacttccactgaaccaagcgaaggtagcgctcctggcacttctactgaaccatccgaaggttccgctcctggtacgtctgaaagcgctacccctgaaagcggcccaggcacctctgaaagcgctactcctgagagcggtccaggctctccagcaggttctccaacctccactgaagaaggcacctctgagtctgctacccctgaatctggtcctggctccgaacctgctacctctggttccgaaactccaggtacctcggaatctgcgactccggaatctggcccgggcacgagcacggagccgtctgagggtagcgcaccaggtaccagcactgagccttctgagggctctgcaccgggtacctccacggaaccttcggaaggttctgcgccgggtacctccactgagccatccgagggttcagcaccaggtactagcacggaaccgtccgagggctctgcaccaggtacgagcaccgaaccgtcggagggtagcgctccaggtagcccagcgggctctccgacaagcaccgaagaaggcaccagcaccgagccgtccgaaggttccgcaccaggtacaagcgagagcgcgactcctgaatctggtccgggtagcgagcctgcaaccagcggttctgagacgccgggcacttccgaatctgcgaccccggagtccggtccaggttcagagccggcgacgagcggttcggaaacgccgggtacgtctgaatcagccacgccggagtctggtccgggtacctcgaccgaaccaagcgaaggttcggcaccgggtactagcgagagcgcaacccctgaaagcggtccgggcagcccggcaggttctccaaccagcaccgaagaaggttcccctgctggtagcccgacctctacggaggaaggtagccctgcaggttccccaacttctactgaggaaggtacttctgagtccgctaccccagaaagcggtcctggtacctccactgaaccgtctgaaggctctgcaccaggcacttctgagtctgctactccagaaagcggcccaggttctgaaccagcaacttctggctctgagactccaggcacttctgagtccgcaacgcctgaatccggtcctggttctgaaccagctacttccggcagcgaaaccccaggtacctctgagtctgcgactccagagtctggtcctggtacttccactgagcctagcgagggttccgcaccaggttctccggctggtagcccgaccagcacggaggagggtacgtctgaatctgcaacgccggaatcgggcccaggttcggagcctgcaacgtctggcagcgaaaccccgggtacctccgaatctgctacaccggaaagcggtcctggcagccctgctggttctccaacctctaccgaggagggttcaccggcaggtagcccgactagcactgaagaaggtactagcacggagccgagcgagggtagtgctccgggtacgagcgagagcgcaacgccagagagcggtccaggcaccagcgaatcggccacccctgagagcggcccaggtacttctgagagcgccactcctgaatccggccctggtagcgagccggcaacctccggctcagaaactcctggttcggaaccagcgaccagcggttctgaaactccgggtagcccggcaggcagcccaacgagcaccgaagagggtaccagcacggaaccgagcgagggttctgccccgggtacttccaccgaaccatcggagggctctgcacctggtagcgaacctgcgacgtctggttctgaaacgccgggtaccagcgaaagcgctaccccagaatccggtccgggcactagcaccgagccatcggagggctccgcaccaggtcaccatcatcaccatcac

SEQ ID NO: 809 - DNA, 4275 bp, Artificial Sequence
  Description of Artificial Sequence: Synthetic polynucleotide
gatatccagatgacccagagcccttcttccctgtccgcatccgtcggcgatcgtgtcacgattacctgtcgcagcactaagagcctgctgcactcaaacggtatcacgtacctgtactggtaccagcagaagccgggcaaagcgccgaagctgctgatttatcagatgagcaacctggcatcgggcgtgccgagccgtttcagcagcagcggtagcggtaccgacttcacgctgaccatcagctcgttgcagccagaggactttgcgacgtactattgtgcgcaaaacttggaaattccgcgcaccttcggccagggtacgaaagttgagattaaaggtgccaccccaccggagactggtgcagaaaccgagtctccgggcgaaaccacgggcggtagcgcggagagcgaaccgcctggtgagggtcaagttcaattggttcagagcggtccgggtctggttcaaccgggcggcagcgtgcgcatttcttgtgcggccagcggttacacctttacgaactacggtatgaattgggtgaaacaagctccgggcaaaggtctggagtggatgggttggatcaatacctataccggtgaatccacttacgcggattcctttaagggccgtttcaccttcagcctggacacgagcgcgagcgctgcatatctgcaaatcaatagcctgcgtgccgaagataccgcggtgtactattgcgcgcgttttgcaatcaagggcgactattggggtcaaggcacgctgctgaccgtgtcctcaggtggtggcggcagcgagttagttgtgacccaagagccgagccataccgttagcccgggtggtacggtcaccctgacgtgccgtagcagcaccggtgcggtcacgagcagcaactatgccaattgggtccagcagaaaccgggtcaagcaccgcgtggcctgatcggcggcaccattaaacgtgccccgggtactcctgcgcgtttctccggtagcctgctgggcggcaaagccgctctgaccctgagcggtgtccagccggaagatgaagcggagtactactgcgcgctgtggtatccgaatctgtgggtttttggcggcggtaccaagctgaccgtattgggtgctacgccaccggagactggcgcagaaacggaaagcccgggtgagactacgggtggctctgcggagagcgaacctccgggtgagggtgaggtccaactgctggagtctggtggtggcattgttcaaccgggtggctcgttgaagctgagctgtgcagctagcggctttaccttcaacacctatgcgatgaattgggttcgtcaggcaccgggtaagggcctggaatgggtggcgcgtatccgctccaagtacaacaactacgcgacctactacgcggatagcgttaaagaccgcttcacgattagccgtgacgattccaagaatacggtgtatctgcaaatgaacaatctgaaaaccgaagataccgcggtgtattactgtgtgcgccacgaaaatttcggcaacagctacgtgagctggtttgcacattggggtcagggcaccctggttacggtgagctccggcaccgccgaagcagctagcgcctctggcgaatctggtcgtgcagctaacaccgctccagagggtctgactgggcctccaggtagcccagctggtagcccaacctctaccgaagaaggtacctctgaatccgctactccagaatccggtcctggtactagcactgagccaagcgaaggttctgctccaggctccccggcaggtagccctacctctaccgaagagggcactagcaccgaaccatctgagggttccgctcctggcacctccactgaaccgtccgaaggcagtgctccgggtacttccgaaagcgcaactccggaatccggccctggttctgagcctgctacttccggctctgaaactccaggtagcgagccagcgacttctggttctgaaactccaggttcaccggcgggtagcccgacgagcacggaggaaggtacctctgagtcggccactcctgagtccggtccgggcacgagcaccgagccgagcgagggttcagccccgggtaccagcacggagccgtccgagggtagcgcaccgggttctccggcgggctcccctacgtctacggaagagggtacgtccactgaacctagcgagggcagcgcgccaggcaccagcactgaaccgagcgaaggcagcgcacctggcactagcgagtctgcgactccggagagcggtccgggtacgagcacggaaccaagcgaaggcagcgccccaggtacctctgaatctgctaccccagaatctggcccgggttccgagccagctacctctggttctgaaaccccaggtacttccactgaaccaagcgaaggtagcgctcctggcacttctactgaaccatccgaaggttccgctcctggtacgtctgaaagcgctacccctgaaagcggcccaggcacctctgaaagcgctactcctgagagcggtccaggctctccagcaggttctccaacctccactgaagaaggcacctctgagtctgctacccctgaatctggtcctggctccgaacctgctacctctggttccgaaactccaggtacctcggaatctgcgactccggaatctggcccgggcacgagcacggagccgtctgagggtagcgcaccaggtaccagcactgagccttctgagggctctgcaccgggtacctccacggaaccttcggaaggttctgcgccgggtacctccactgagccatccgagggttcagcaccaggtactagcacggaaccgtccgagggctctgcaccaggtacgagcaccgaaccgtcggagggtagcgctccaggtagcccagcgggctctccgacaagcaccgaagaaggcaccagcaccgagccgtccgaaggttccgcaccaggtacaagcgagagcgcgactcctgaatctggtccgggtagcgagcctgcaaccagcggttctgagacgccgggcacttccgaatctgcgaccccggagtccggtccaggttcagagccggcgacgagcggttcggaaacgccgggtacgtctgaatcagccacgccggagtctggtccgggtacctcgaccgaaccaagcgaaggttcggcaccgggtactagcgagagcgcaacccctgaaagcggtccgggcagcccggcaggttctccaaccagcaccgaagaaggttcccctgctggtagcccgacctctacggaggaaggtagccctgcaggttccccaacttctactgaggaaggtacttctgagtccgctaccccagaaagcggtcctggtacctccactgaaccgtctgaaggctctgcaccaggcacttctgagtctgctactccagaaagcggcccaggttctgaaccagcaacttctggctctgagactccaggcacttctgagtccgcaacgcctgaatccggtcctggttctgaaccagctacttccggcagcgaaaccccaggtacctctgagtctgcgactccagagtctggtcctggtacttccactgagcctagcgagggttccgcaccaggttctccggctggtagcccgaccagcacggaggagggtacgtctgaatctgcaacgccggaatcgggcccaggttcggagcctgcaacgtctggcagcgaaaccccgggtacctccgaatctgctacaccggaaagcggtcctggcagccctgctggttctccaacctctaccgaggagggttcaccggcaggtagcccgactagcactgaagaaggtactagcacggagccgagcgagggtagtgctccgggtacgagcgagagcgcaacgccagagagcggtccaggcaccagcgaatcggccacccctgagagcggcccaggtacttctgagagcgccactcctgaatccggccctggtagcgagccggcaacctccggctcagaaactcctggttcggaaccagcgaccagcggttctgaaactccgggtagcccggcaggcagcccaacgagcaccgaagagggtaccagcacggaaccgagcgagggttctgccccgggtacttccaccgaaccatcggagggctctgcacctggtagcgaacctgcgacgtctggttctgaaacgccgggtaccagcgaaagcgctaccccagaatccggtccgggcactagcaccgagccatcggagggctccgcaccaggtcaccatcatcaccatcac

SEQ ID NO: 810 - DNA, 4275 bp, Artificial Sequence
  Description of Artificial Sequence: Synthetic polynucleotide
gatatccagatgacccagagcccttcttccctgtccgcatccgtcggcgatcgtgtcacgattacctgtcgcagcactaagagcctgctgcactcaaacggtatcacgtacctgtactggtaccagcagaagccgggcaaagcgccgaagctgctgatttatcagatgagcaacctggcatcgggcgtgccgagccgtttcagcagcagcggtagcggtaccgacttcacgctgaccatcagctcgttgcagccagaggactttgcgacgtactattgtgcgcaaaacttggaaattccgcgcaccttcggccagggtacgaaagttgagattaaaggtgccaccccaccggagactggtgcagaaaccgagtctccgggcgaaaccacgggcggtagcgcggagagcgaaccgcctggtgagggtcaagttcaattggttcagagcggtccgggtctggttcaaccgggcggcagcgtgcgcatttcttgtgcggccagcggttacacctttacgaactacggtatgaattgggtgaaacaagctccgggcaaaggtctggagtggatgggttggatcaatacctataccggtgaatccacttacgcggattcctttaagggccgtttcaccttcagcctggacacgagcgcgagcgctgcatatctgcaaatcaatagcctgcgtgccgaagataccgcggtgtactattgcgcgcgttttgcaatcaagggcgactattggggtcaaggcacgctgctgaccgtgtcctcaggtggtggcggcagcgagttagttgtgacccaagagccgagccataccgttagcccgggtggtacggtcaccctgacgtgccgtagcagcaccggtgaagtcacgaccagcaactatgccaattgggtccagcagaaaccgggtcaagcaccgcgtggcctgatcggcggcaccattaaacgtgccccgggtactcctgcgcgtttctccggtagcctgctgggcggcaaagccgctctgaccctgagcggtgtccagccggaagatgaagcggagtactactgcgcgctgtggtatccgaatctgtgggtttttggcggcggtaccaagctgaccgtattgggtgctacgccaccggagactggcgcagaaacggaaagcccgggtgagactacgggtggctctgcggagagcgaacctccgggtgagggtgaggtccaactgctggagtctggtggtggcattgttcaaccgggtggctcgttgaagctgagctgtgcagctagcggctttaccttcaacacctatgcgatgaattgggttcgtcaggcaccgggtaagggcctggaatgggtggcgcgtatccgctccaagtacaacaactacgcgacctactacgcggatagcgttaaagaccgcttcacgattagccgtgacgattccaagaatacggtgtatctgcaaatgaacaatctgaaaaccgaagataccgcggtgtattactgtgtgcgccacgaaaatttcggcaacagctacgtgagctggtttgcacattggggtcagggcaccctggttacggtgagctccggcaccgccgaagcagctagcgcctctggcgaatctggtcgtgcagctaacaccgctccagagggtctgactgggcctccaggtagcccagctggtagcccaacctctaccgaagaaggtacctctgaatccgctactccagaatccggtcctggtactagcactgagccaagcgaaggttctgctccaggctccccggcaggtagccctacctctaccgaagagggcactagcaccgaaccatctgagggttccgctcctggcacctccactgaaccgtccgaaggcagtgctccgggtacttccgaaagcgcaactccggaatccggccctggttctgagcctgctacttccggctctgaaactccaggtagcgagccagcgacttctggttctgaaactccaggttcaccggcgggtagcccgacgagcacggaggaaggtacctctgagtcggccactcctgagtccggtccgggcacgagcaccgagccgagcgagggttcagccccgggtaccagcacggagccgtccgagggtagcgcaccgggttctccggcgggctcccctacgtctacggaagagggtacgtccactgaacctagcgagggcagcgcgccaggcaccagcactgaaccgagcgaaggcagcgcacctggcactagcgagtctgcgactccggagagcggtccgggtacgagcacggaaccaagcgaaggcagcgccccaggtacctctgaatctgctaccccagaatctggcccgggttccgagccagctacctctggttctgaaaccccaggtacttccactgaaccaagcgaaggtagcgctcctggcacttctactgaaccatccgaaggttccgctcctggtacgtctgaaagcgctacccctgaaagcggcccaggcacctctgaaagcgctactcctgagagcggtccaggctctccagcaggttctccaacctccactgaagaaggcacctctgagtctgctacccctgaatctggtcctggctccgaacctgctacctctggttccgaaactccaggtacctcggaatctgcgactccggaatctggcccgggcacgagcacggagccgtctgagggtagcgcaccaggtaccagcactgagccttctgagggctctgcaccgggtacctccacggaaccttcggaaggttctgcgccgggtacctccactgagccatccgagggttcagcaccaggtactagcacggaaccgtccgagggctctgcaccaggtacgagcaccgaaccgtcggagggtagcgctccaggtagcccagcgggctctccgacaagcaccgaagaaggcaccagcaccgagccgtccgaaggttccgcaccaggtacaagcgagagcgcgactcctgaatctggtccgggtagcgagcctgcaaccagcggttctgagacgccgggcacttccgaatctgcgaccccggagtccggtccaggttcagagccggcgacgagcggttcggaaacgccgggtacgtctgaatcagccacgccggagtctggtccgggtacctcgaccgaaccaagcgaaggttcggcaccgggtactagcgagagcgcaacccctgaaagcggtccgggcagcccggcaggttctccaaccagcaccgaagaaggttcccctgctggtagcccgacctctacggaggaaggtagccctgcaggttccccaacttctactgaggaaggtacttctgagtccgctaccccagaaagcggtcctggtacctccactgaaccgtctgaaggctctgcaccaggcacttctgagtctgctactccagaaagcggcccaggttctgaaccagcaacttctggctctgagactccaggcacttctgagtccgcaacgcctgaatccggtcctggttctgaaccagctacttccggcagcgaaaccccaggtacctctgagtctgcgactccagagtctggtcctggtacttccactgagcctagcgagggttccgcaccaggttctccggctggtagcccgaccagcacggaggagggtacgtctgaatctgcaacgccggaatcgggcccaggttcggagcctgcaacgtctggcagcgaaaccccgggtacctccgaatctgctacaccggaaagcggtcctggcagccctgctggttctccaacctctaccgaggagggttcaccggcaggtagcccgactagcactgaagaaggtactagcacggagccgagcgagggtagtgctccgggtacgagcgagagcgcaacgccagagagcggtccaggcaccagcgaatcggccacccctgagagcggcccaggtacttctgagagcgccactcctgaatccggccctggtagcgagccggcaacctccggctcagaaactcctggttcggaaccagcgaccagcggttctgaaactccgggtagcccggcaggcagcccaacgagcaccgaagagggtaccagcacggaaccgagcgagggttctgccccgggtacttccaccgaaccatcggagggctctgcacctggtagcgaacctgcgacgtctggttctgaaacgccgggtaccagcgaaagcgctaccccagaatccggtccgggcactagcaccgagccatcggagggctccgcaccaggtcaccatcatcaccatcac

SEQ ID NO: 811 - DNA, 5229 bp, Artificial Sequence
  Description of Artificial Sequence: Synthetic polynucleotide
caccatcatcaccatcactccccagcaggcagcccgaccagcaccgaggagggtacgagcgagtcggctactccagagagcggtccgggtacctctacggaaccgtccgaaggtagcgctccaggcacgtctgaaagcgcgacgccggaaagcggtccaggcagcgagccggcgacctccggtagcgaaacgcctggtacctcggagtcagcgactccggaaagcggtccgggtagcgaacctgcaacgagcggtagcgagactccaggcactagcgaatccgcaactccggagtcgggtccgggcacctctacggagcctagcgagggctcagcaccaggtagccctgcaggttccccgacgtcaaccgaggaaggtacaagcgaaagcgccacccctgagtcgggccctggcagcgaaccggcaactagcggcagcgagactccgggtaccagcgagtctgctacgccagagagcggcccaggttcgccagcgggttcgccgactagcacggaggagggcagcccagcgggtagcccgaccagcactgaggagggtacgtccaccgaaccgagcgaaggtagcgcaccaggtacctccgagtctgccacccctgaatccggtccaggtaccagcgaatcagccaccccggagtcgggtccaggtacgagcgaatctgctaccccggaatccggcccaggcagcgaacctgctactagcggcagcgaaacgccgggcagcgaacctgccacgtcaggcagcgagacgccgggttcccctgcaggctccccgaccagcactgaggagggcacctccaccgaaccatcagaaggtagcgcgcctggtacgtcaaccgaaccttccgagggcagcgcaccgggtggctcagcgcctgaggcaggtcgttctgctaaccatacccctgcaggattaactggccccgccaccagcgggagcgagacccccgggactgacattcagatgactcagtctccgtcctccctgtctgcgagcgtgggcgaccgtgtgactattacctgtaaagcctcccaggacgtgtctatcggtgtggcatggtatcaacaaaagccgggtaaggcacctaaactgctgatctactccgcttcttaccgttacacgggcgttccgtcccgttttagcggttccggtagcggtactgattttaccctgactatttcctccctgcaaccagaagactttgcgacctattactgtcagcaatactatatttacccgtataccttcggccagggcactaaggttgaaattaaaggtgcaacgcctccggagactggtgctgaaactgagtccccgggcgagacgaccggtggctctgctgaatccgaaccaccgggcgaaggcgaggttcagctggtggagtctggcggcggtctggtacagccgggtggtagcctgcgtctgagctgcgcggcgtccggtttcactttcaccgattataccatggactgggttcgccaggcaccgggcaagggtctggaatgggtggcggacgtgaacccgaactccggtggttctatctacaaccagcgtttcaaaggtcgtttcacgctgagcgtagatcgtagcaaaaacactctgtacctgcagatgaactccctgcgcgcagaagacaccgcggtgtattactgtgcacgtaacctgggcccgtccttctatttcgactactggggtcaaggtactctggtaactgtttcctctggtggtggcggcagcgagttagttgtgacccaagagccgagcctgaccgttagcccgggtggtacggtcaccctgacgtgccgtagcagcaacggtgcggtcacgagcagcaactatgccaattgggtccagcagaaaccgggtcaagcaccgcgtggcctgatcggcggcaccaataaacgtgccccgggtactcctgcgcgtttctccggtagcctgctgggcggcaaagccgctctgaccctgagcggtgtccagccggaagatgaagcggtgtactactgcgcgctgtggtatccgaatctgtgggtttttggcggcggtaccaagctgaccgtattgggtgctacgccaccggagactggcgcagaaacggaaagcccgggtgagactacgggtggctctgcggagagcgaacctccgggtgagggtgaggtccaactgctggagtctggtggtggcattgttcaaccgggtggctcgttgaagctgagctgtgcagctagcggctttaccttcaacacctatgcgatgaattgggttcgtcaggcaccgggtaagggcctggaatgggtggcgcgtatccgctccaagtacaacaactacgcgacctactacgcggatagcgttaaagaccgcttcacgattagccgtgacgattccaagaatacggtgtatctgcaaatgaacaatctgaaaaccgaagataccgcggtgtattactgtgtgcgccacgaaaatttcggcaacagctacgtgagctggtttgcacattggggtcagggcaccctggttacggtgagctccgggactgctgaggcggctagcgcctccggagaagctggaagaagcgccaatcacacaccagctggacttacaggcccgcctggtagccccgcggggagccctacaagcactgaggagggcacatctgagtccgctacccctgagagtggacccgggacaagcactgagcctagcgaaggaagcgcaccaggttcccccgctgggagccccacaagcacagaagagggaacttctaccgagccctctgagggctcagcccctggaactagcacagagccctccgaaggcagtgcaccgggtacttccgaaagcgcaactccggaatccggccctggttctgagcctgctacttccggctctgaaactccaggtagcgagccagcgacttctggttctgaaactccaggttcaccggcgggtagcccgacgagcacggaggaaggtacctctgagtcggccactcctgagtccggtccgggcacgagcaccgagccgagcgagggttcagccccgggtaccagcacggagccgtccgagggtagcgcaccgggttctccggcgggctcccctacgtctacggaagagggtacgtccactgaacctagcgagggcagcgcgccaggcaccagcactgaaccgagcgaaggcagcgcacctggcactagcgagtctgcgactccggagagcggtccgggtacgagcacggaaccaagcgaaggcagcgccccaggtacctctgaatctgctaccccagaatctggcccgggttccgagccagctacctctggttctgaaaccccaggtacttccactgaaccaagcgaaggtagcgctcctggcacttctactgaaccatccgaaggttccgctcctggtacgtctgaaagcgctacccctgaaagcggcccaggcacctctgaaagcgctactcctgagagcggtccaggctctccagcaggttctccaacctccactgaagaaggcacctctgagtctgctacccctgaatctggtcctggctccgaacctgctacctctggttccgaaactccaggtacctcggaatctgcgactccggaatctggcccgggcacgagcacggagccgtctgagggtagcgcaccaggtaccagcactgagccttctgagggctctgcaccgggtacctccacggaaccttcggaaggttctgcgccgggtacctccactgagccatccgagggttcagcaccaggtactagcacggaaccgtccgagggctctgcaccaggtacgagcaccgaaccgtcggagggtagcgctccaggtagcccagcgggctctccgacaagcaccgaagaaggcaccagcaccgagccgtccgaaggttccgcaccaggtacaagcgagagcgcgactcctgaatctggtccgggtagcgagcctgcaaccagcggttctgagacgccgggcacttccgaatctgcgaccccggagtccggtccaggttcagagccggcgacgagcggttcggaaacgccgggtacgtctgaatcagccacgccggagtctggtccgggtacctcgaccgaaccaagcgaaggttcggcaccgggtactagcgagagcgcaacccctgaaagcggtccgggcagcccggcaggttctccaaccagcaccgaagaaggttcccctgctggtagcccgacctctacggaggaaggtagccctgcaggttccccaacttctactgaggaaggtacttctgagtccgctaccccagaaagcggtcctggtacctccactgaaccgtctgaaggctctgcaccaggcacttctgagtctgctactccagaaagcggcccaggttctgaaccagcaacttctggctctgagactccaggcacttctgagtccgcaacgcctgaatccggtcctggttctgaaccagctacttccggcagcgaaaccccaggtacctctgagtctgcgactccagagtctggtcctggtacttccactgagcctagcgagggttccgcaccaggttctccggctggtagcccgaccagcacggaggagggtacgtctgaatctgcaacgccggaatcgggcccaggttcggagcctgcaacgtctggcagcgaaaccccgggtacctccgaatctgctacaccggaaagcggtcctggcagccctgctggttctccaacctctaccgaggagggttcaccggcaggtagcccgactagcactgaagaaggtactagcacggagccgagcgagggtagtgctccgggtacgagcgagagcgcaacgccagagagcggtccaggcaccagcgaatcggccacccctgagagcggcccaggtacttctgagagcgccactcctgaatccggccctggtagcgagccggcaacctccggctcagaaactcctggttcggaaccagcgaccagcggttctgaaactccgggtagcccggcaggcagcccaacgagcaccgaagagggtaccagcacggaaccgagcgagggttctgccccgggtacttccaccgaaccatcggagggctctgcacctggtagcgaacctgcgacgtctggttctgaaacgccgggtaccagcgaaagcgctaccccagaatccggtccgggcactagcaccgagccatcggagggcgccgcagaaccagaggcg

SEQ ID NO: 812 - DNA, 5229 bp, Artificial Sequence
  Description of Artificial Sequence: Synthetic polynucleotide
caccatcatcaccatcactccccagcaggcagcccgaccagcaccgaggagggtacgagcgagtcggctactccagagagcggtccgggtacctctacggaaccgtccgaaggtagcgctccaggcacgtctgaaagcgcgacgccggaaagcggtccaggcagcgagccggcgacctccggtagcgaaacgcctggtacctcggagtcagcgactccggaaagcggtccgggtagcgaacctgcaacgagcggtagcgagactccaggcactagcgaatccgcaactccggagtcgggtccgggcacctctacggagcctagcgagggctcagcaccaggtagccctgcaggttccccgacgtcaaccgaggaaggtacaagcgaaagcgccacccctgagtcgggccctggcagcgaaccggcaactagcggcagcgagactccgggtaccagcgagtctgctacgccagagagcggcccaggttcgccagcgggttcgccgactagcacggaggagggcagcccagcgggtagcccgaccagcactgaggagggtacgtccaccgaaccgagcgaaggtagcgcaccaggtacctccgagtctgccacccctgaatccggtccaggtaccagcgaatcagccaccccggagtcgggtccaggtacgagcgaatctgctaccccggaatccggcccaggcagcgaacctgctactagcggcagcgaaacgccgggcagcgaacctgccacgtcaggcagcgagacgccgggttcccctgcaggctccccgaccagcactgaggagggcacctccaccgaaccatcagaaggtagcgcgcctggtacgtcaaccgaaccttccgagggcagcgcaccgggtggctcagcgcctgaggcaggtcgttctgctaaccatacccctgcaggattaactggccccgccaccagcgggagcgagacccccgggactgatatccagatgacccaaagccctagttcattaagcgcatcggtgggtgaccgggtaaccattacctgtcaagcaagtcaggatatcagcaactacctgaactggtaccagcagaaacccggaaaagcgccgaaactgctgatctatgatgccagcaatctggaaacaggtgttcctagccgtttctctggatcaggttcaggaaccgattttacattcaccattagctcattacagccggaggatatcgcgacgtatttttgccagcacttcgatcatctgcctttagcatttggcggcggtactaaagtggagatcaaaggagcgacgccgcctgagactggagcagagaccgaatcacctggtgagacgacgggcgggtcagccgaaagcgagccaccgggggaagggcaggttcaattgcaagaaagtggaccgggcttagtcaaacccagcgaaaccctctccctgacctgcacagtcagcggagggtctgtgagctcaggcgactactattggacctggattagacaatcaccaggtaaaggtcttgagtggattggccacatctactatagcggtaacaccaactataatccgagcctgaaaagtcgtctgaccatcagcatcgacaccagcaaaacccagtttagcctgaaattaagcagcgttacagcagcggatacagcgatttactattgtgtccgtgatcgcgttactggcgcatttgatatttgggggcagggaacaatggttactgtgtcaagtggaggaggtggcagtgagttagttgtgacccaagagccgagcctgaccgttagcccgggtggtacggtcaccctgacgtgccgtagcagcaacggtgcggtcacgagcagcaactatgccaattgggtccagcagaaaccgggtcaagcaccgcgtggcctgatcggcggcaccaataaacgtgccccgggtactcctgcgcgtttctccggtagctcactgggcggctcagccgctctgaccctgagcggtgtccagccggaagatgaagcggtgtactactgcgcgctgtggtatccgaatctgtgggtttttggcggcggtaccaagctgaccgtattgggtgctacgccaccggagactggcgcagaaacggaaagcccgggtgagactacgggtggctctgcggagagcgaacctccgggtgagggtgaggtccaactgcaggagtctggtggtggcattgttcaaccgggtggctcgttgaagctgagctgtgcagctagcggctttaccttcaacacctatgcgatgaattgggttcgtcaggcaccgggtaagggcctggaatgggtggcgcgtatccgctccaagtacaacaactacgcgacctactacgcggatagcgttaaagaccgcttcacgattagccgtgacgattccaagaatacggtgtatctgcaaatgaacaatctgaaaaccgaagataccgcggtgtattactgtgtgcgccacgaaaatttcggcaacagctacgtgagctggtttgcacattggggtcagggcaccctggttacggtgagctccgggactgctgaggcggctagcgcctccggagaagctggaagaagcgccaatcacacaccagctggacttacaggcccgcctggtagccccgcggggagccctacaagcactgaggagggcacatctgagtccgctacccctgagagtggacccgggacaagcactgagcctagcgaaggaagcgcaccaggttcccccgctgggagccccacaagcacagaagagggaacttctaccgagccctctgagggctcagcccctggaactagcacagagccctccgaaggcagtgcaccgggtacttccgaaagcgcaactccggaatccggccctggttctgagcctgctacttccggctctgaaactccaggtagcgagccagcgacttctggttctgaaactccaggttcaccggcgggtagcccgacgagcacggaggaaggtacctctgagtcggccactcctgagtccggtccgggcacgagcaccgagccgagcgagggttcagccccgggtaccagcacggagccgtccgagggtagcgcaccgggttctccggcgggctcccctacgtctacggaagagggtacgtccactgaacctagcgagggcagcgcgccaggcaccagcactgaaccgagcgaaggcagcgcacctggcactagcgagtctgcgactccggagagcggtccgggtacgagcacggaaccaagcgaaggcagcgccccaggtacctctgaatctgctaccccagaatctggcccgggttccgagccagctacctctggttctgaaaccccaggtacttccactgaaccaagcgaaggtagcgctcctggcacttctactgaaccatccgaaggttccgctcctggtacgtctgaaagcgctacccctgaaagcggcccaggcacctctgaaagcgctactcctgagagcggtccaggctctccagcaggttctccaacctccactgaagaaggcacctctgagtctgctacccctgaatctggtcctggctccgaacctgctacctctggttccgaaactccaggtacctcggaatctgcgactccggaatctggcccgggcacgagcacggagccgtctgagggtagcgcaccaggtaccagcactgagccttctgagggctctgcaccgggtacctccacggaaccttcggaaggttctgcgccgggtacctccactgagccatccgagggttcagcaccaggtactagcacggaaccgtccgagggctctgcaccaggtacgagcaccgaaccgtcggagggtagcgctccaggtagcccagcgggctctccgacaagcaccgaagaaggcaccagcaccgagccgtccgaaggttccgcaccaggtacaagcgagagcgcgactcctgaatctggtccgggtagcgagcctgcaaccagcggttctgagacgccgggcacttccgaatctgcgaccccggagtccggtccaggttcagagccggcgacgagcggttcggaaacgccgggtacgtctgaatcagccacgccggagtctggtccgggtacctcgaccgaaccaagcgaaggttcggcaccgggtactagcgagagcgcaacccctgaaagcggtccgggcagcccggcaggttctccaaccagcaccgaagaaggttcccctgctggtagcccgacctctacggaggaaggtagccctgcaggttccccaacttctactgaggaaggtacttctgagtccgctaccccagaaagcggtcctggtacctccactgaaccgtctgaaggctctgcaccaggcacttctgagtctgctactccagaaagcggcccaggttctgaaccagcaacttctggctctgagactccaggcacttctgagtccgcaacgcctgaatccggtcctggttctgaaccagctacttccggcagcgaaaccccaggtacctctgagtctgcgactccagagtctggtcctggtacttccactgagcctagcgagggttccgcaccaggttctccggctggtagcccgaccagcacggaggagggtacgtctgaatctgcaacgccggaatcgggcccaggttcggagcctgcaacgtctggcagcgaaaccccgggtacctccgaatctgctacaccggaaagcggtcctggcagccctgctggttctccaacctctaccgaggagggttcaccggcaggtagcccgactagcactgaagaaggtactagcacggagccgagcgagggtagtgctccgggtacgagcgagagcgcaacgccagagagcggtccaggcaccagcgaatcggccacccctgagagcggcccaggtacttctgagagcgccactcctgaatccggccctggtagcgagccggcaacctccggctcagaaactcctggttcggaaccagcgaccagcggttctgaaactccgggtagcccggcaggcagcccaacgagcaccgaagagggtaccagcacggaaccgagcgagggttctgccccgggtacttccaccgaaccatcggagggctctgcacctggtagcgaacctgcgacgtctggttctgaaacgccgggtaccagcgaaagcgctaccccagaatccggtccgggcactagcaccgagccatcggagggcgccgcagaaccagaggcg

SEQ ID NO: 813 - DNA, 5229 bp, Artificial Sequence
  Description of Artificial Sequence: Synthetic polynucleotide
caccatcatcaccatcactccccagcaggcagcccgaccagcaccgaggagggtacgagcgagtcggctactccagagagcggtccgggtacctctacggaaccgtccgaaggtagcgctccaggcacgtctgaaagcgcgacgccggaaagcggtccaggcagcgagccggcgacctccggtagcgaaacgcctggtacctcggagtcagcgactccggaaagcggtccgggtagcgaacctgcaacgagcggtagcgagactccaggcactagcgaatccgcaactccggagtcgggtccgggcacctctacggagcctagcgagggctcagcaccaggtagccctgcaggttccccgacgtcaaccgaggaaggtacaagcgaaagcgccacccctgagtcgggccctggcagcgaaccggcaactagcggcagcgagactccgggtaccagcgagtctgctacgccagagagcggcccaggttcgccagcgggttcgccgactagcacggaggagggcagcccagcgggtagcccgaccagcactgaggagggtacgtccaccgaaccgagcgaaggtagcgcaccaggtacctccgagtctgccacccctgaatccggtccaggtaccagcgaatcagccaccccggagtcgggtccaggtacgagcgaatctgctaccccggaatccggcccaggcagcgaacctgctactagcggcagcgaaacgccgggcagcgaacctgccacgtcaggcagcgagacgccgggttcccctgcaggctccccgaccagcactgaggagggcacctccaccgaaccatcagaaggtagcgcgcctggtacgtcaaccgaaccttccgagggcagcgcaccgggtggctcagcgcctgaggcaggtcgttctgctaaccatacccctgcaggattaactggccccgccaccagcgggagcgagacccccgggactgatatccagatgacccaaagccctagttcattaagcgcatcggtgggtgaccgggtaaccattacctgtcaagcaagtcaggatatcagcaactacctgaactggtaccagcagaaacccggaaaagcgccgaaactgctgatctatgatgccagcaatctggaaacaggtgttcctagccgtttctctggatcaggttcaggaaccgattttacattcaccattagccgtttacagccggaggataccgcgacgtatttttgccagcacttcgatcatctgcctttagcatttggcggcggtactaaagtggagatcaaaggagcgacgccgcctgagactggagcagagaccgaatcacctggtgagacgacgggcgggtcagccgaaagcgagccaccgggggaagggcaggttcaattgcaagaaagtggaccgggcgccgtcaaacccagcgaaaccctctccctgacctgcacagtcagcggagggtctgtgagctcaggcgactactattggacctggattagacaatcaccaggtaaaggtcttgagtggattggccacatctactatagcggtaacaccaactataatccgagcctgaaaagtcgtctgaccatcagcatcgacaccagcaaaacccagtttagcctgaaattaagcagcgttacagcagcggatacagcgacctactattgtgtccgtgatcgcgttactggcgcatttgatatttgggggcagggaacagcagttactgtgtcaagcggaggaggtggcagtgagttagttgtgacccaagagccgagcctgaccgttagcccgggtggtacggtcaccctgacgtgccgtagcagcaacggtgcggtcacgagcagcaactatgccaattgggtccagcagaaaccgggtcaagcaccgcgtggcctgatcggcggcaccaataaacgtgccccgggtactcctgcgcgtttctccggtagctcactgggcggctcagccgctctgaccctgagcggtgtccagccggaagatgaagcggtgtactactgcgcgctgtggtatccgaatctgtgggtttttggcggcggtaccaagctgaccgtattgggtgctacgccaccggagactggcgcagaaacggaaagcccgggtgagactacgggtggctctgcggagagcgaacctccgggtgagggtgaggtccaactgcaggagtctggtggtggcattgttcaaccgggtggctcgttgaagctgagctgtgcagctagcggctttaccttcaacacctatgcgatgaattgggttcgtcaggcaccgggtaagggcctggaatgggtggcgcgtatccgctccaagtacaacaactacgcgacctactacgcggatagcgttaaagaccgcttcacgattagccgtgacgattccaagaatacggtgtatctgcaaatgaacaatctgaaaaccgaagataccgcggtgtattactgtgtgcgccacgaaaatttcggcaacagctacgtgagctggtttgcacattggggtcagggcaccctggttacggtgagctccgggactgctgaggcggctagcgcctccggagaagctggaagaagcgccaatcacacaccagctggacttacaggcccgcctggtagccccgcggggagccctacaagcactgaggagggcacatctgagtccgctacccctgagagtggacccgggacaagcactgagcctagcgaaggaagcgcaccaggttcccccgctgggagccccacaagcacagaagagggaacttctaccgagccctctgagggctcagcccctggaactagcacagagccctccgaaggcagtgcaccgggtacttccgaaagcgcaactccggaatccggccctggttctgagcctgctacttccggctctgaaactccaggtagcgagccagcgacttctggttctgaaactccaggttcaccggcgggtagcccgacgagcacggaggaaggtacctctgagtcggccactcctgagtccggtccgggcacgagcaccgagccgagcgagggttcagccccgggtaccagcacggagccgtccgagggtagcgcaccgggttctccggcgggctcccctacgtctacggaagagggtacgtccactgaacctagcgagggcagcgcgccaggcaccagcactgaaccgagcgaaggcagcgcacctggcactagcgagtctgcgactccggagagcggtccgggtacgagcacggaaccaagcgaaggcagcgccccaggtacctctgaatctgctaccccagaatctggcccgggttccgagccagctacctctggttctgaaaccccaggtacttccactgaaccaagcgaaggtagcgctcctggcacttctactgaaccatccgaaggttccgctcctggtacgtctgaaagcgctacccctgaaagcggcccaggcacctctgaaagcgctactcctgagagcggtccaggctctccagcaggttctccaacctccactgaagaaggcacctctgagtctgctacccctgaatctggtcctggctccgaacctgctacctctggttccgaaactccaggtacctcggaatctgcgactccggaatctggcccgggcacgagcacggagccgtctgagggtagcgcaccaggtaccagcactgagccttctgagggctctgcaccgggtacctccacggaaccttcggaaggttctgcgccgggtacctccactgagccatccgagggttcagcaccaggtactagcacggaaccgtccgagggctctgcaccaggtacgagcaccgaaccgtcggagggtagcgctccaggtagcccagcgggctctccgacaagcaccgaagaaggcaccagcaccgagccgtccgaaggttccgcaccaggtacaagcgagagcgcgactcctgaatctggtccgggtagcgagcctgcaaccagcggttctgagacgccgggcacttccgaatctgcgaccccggagtccggtccaggttcagagccggcgacgagcggttcggaaacgccgggtacgtctgaatcagccacgccggagtctggtccgggtacctcgaccgaaccaagcgaaggttcggcaccgggtactagcgagagcgcaacccctgaaagcggtccgggcagcccggcaggttctccaaccagcaccgaagaaggttcccctgctggtagcccgacctctacggaggaaggtagccctgcaggttccccaacttctactgaggaaggtacttctgagtccgctaccccagaaagcggtcctggtacctccactgaaccgtctgaaggctctgcaccaggcacttctgagtctgctactccagaaagcggcccaggttctgaaccagcaacttctggctctgagactccaggcacttctgagtccgcaacgcctgaatccggtcctggttctgaaccagctacttccggcagcgaaaccccaggtacctctgagtctgcgactccagagtctggtcctggtacttccactgagcctagcgagggttccgcaccaggttctccggctggtagcccgaccagcacggaggagggtacgtctgaatctgcaacgccggaatcgggcccaggttcggagcctgcaacgtctggcagcgaaaccccgggtacctccgaatctgctacaccggaaagcggtcctggcagccctgctggttctccaacctctaccgaggagggttcaccggcaggtagcccgactagcactgaagaaggtactagcacggagccgagcgagggtagtgctccgggtacgagcgagagcgcaacgccagagagcggtccaggcaccagcgaatcggccacccctgagagcggcccaggtacttctgagagcgccactcctgaatccggccctggtagcgagccggcaacctccggctcagaaactcctggttcggaaccagcgaccagcggttctgaaactccgggtagcccggcaggcagcccaacgagcaccgaagagggtaccagcacggaaccgagcgagggttctgccccgggtacttccaccgaaccatcggagggctctgcacctggtagcgaacctgcgacgtctggttctgaaacgccgggtaccagcgaaagcgctaccccagaatccggtccgggcactagcaccgagccatcggagggcgccgcagaaccagaggcg

SEQ ID NO: 814 - DNA, 4377 bp, Artificial Sequence
  Description of Artificial Sequence: Synthetic polynucleotide
caccatcatcaccatcactccccagcaggcagcccgaccagcaccgaggagggtacgagcgagtcggctactccagagagcggtccgggtacctctacggaaccgtccgaaggtagcgctccaggcacgtctgaaagcgcgacgccggaaagcggtccaggcagcgagccggcgacctccggtagcgaaacgcctggtacctcggagtcagcgactccggaaagcggtccgggtagcgaacctgcaacgagcggtagcgagactccaggcactagcgaatccgcaactccggagtcgggtccgggcacctctacggagcctagcgagggctcagcaccaggtagccctgcaggttccccgacgtcaaccgaggaaggtacaagcgaaagcgccacccctgagtcgggccctggcagcgaaccggcaactagcggcagcgagactccgggtaccagcgagtctgctacgccagagagcggcccaggttcgccagcgggttcgccgactagcacggaggagggcagcccagcgggtagcccgaccagcactgaggagggtacgtccaccgaaccgagcgaaggtagcgcaccaggtacctccgagtctgccacccctgaatccggtccaggtaccagcgaatcagccaccccggagtcgggtccaggtacgagcgaatctgctaccccggaatccggcccaggcagcgaacctgctactagcggcagcgaaacgccgggcagcgaacctgccacgtcaggcagcgagacgccgggttcccctgcaggctccccgaccagcactgaggagggcacctccaccgaaccatcagaaggtagcgcgcctggtacgtcaaccgaaccttccgagggcagcgcaccgggtggctcagcgcctgaggcaggtcgttctgctaaccatacccctgcaggattaactggccccgccaccagcgggagcgagacccccgggactgacattcagatgactcagtctccgtcctccctgtctgcgagcgtgggcgaccgtgtgactattacctgtaaagcctcccaggacgtgtctatcggtgtggcatggtatcaacaaaagccgggtaaggcacctaaactgctgatctactccgcttcttaccgttacacgggcgttccgtcccgttttagcggttccggtagcggtactgattttaccctgactatttcctccctgcaaccagaagactttgcgacctattactgtcagcaatactatatttacccgtataccttcggccagggcactaaggttgaaattaaaggtgcaacgcctccggagactggtgctgaaactgagtccccgggcgagacgaccggtggctctgctgaatccgaaccaccgggcgaaggcgaggttcagctggtggagtctggcggcggtctggtacagccgggtggtagcctgcgtctgagctgcgcggcgtccggtttcactttcaccgattataccatggactgggttcgccaggcaccgggcaagggtctggaatgggtggcggacgtgaacccgaactccggtggttctatctacaaccagcgtttcaaaggtcgtttcacgctgagcgtagatcgtagcaaaaacactctgtacctgcagatgaactccctgcgcgcagaagacaccgcggtgtattactgtgcacgtaacctgggcccgtccttctatttcgactactggggtcaaggtactctggtaactgtttcctctggtggtggcggcagcgagttagttgtgacccaagagccgagcctgaccgttagcccgggtggtacggtcaccctgacgtgccgtagcagcaacggtgcggtcacgagcagcaactatgccaattgggtccagcagaaaccgggtcaagcaccgcgtggcctgatcggcggcaccaataaacgtgccccgggtactcctgcgcgtttctccggtagcctgctgggcggcaaagccgctctgaccctgagcggtgtccagccggaagatgaagcggtgtactactgcgcgctgtggtatccgaatctgtgggtttttggcggcggtaccaagctgaccgtattgggtgctacgccaccggagactggcgcagaaacggaaagcccgggtgagactacgggtggctctgcggagagcgaacctccgggtgagggtgaggtccaactgctggagtctggtggtggcattgttcaaccgggtggctcgttgaagctgagctgtgcagctagcggctttaccttcaacacctatgcgatgaattgggttcgtcaggcaccgggtaagggcctggaatgggtggcgcgtatccgctccaagtacaacaactacgcgacctactacgcggatagcgttaaagaccgcttcacgattagccgtgacgattccaagaatacggtgtatctgcaaatgaacaatctgaaaaccgaagataccgcggtgtattactgtgtgcgccacgaaaatttcggcaacagctacgtgagctggtttgcacattggggtcagggcaccctggttacggtgagctccgggactgctgaggcggctagcgcctccggagaagctggaagaagcgccaatcacacaccagctggacttacaggcccgcctggtagccccgcggggagccctacaagcactgaggagggcacatctgagtccgctacccctgagagtggacccgggacaagcactgagcctagcgaaggaagcgcaccaggttcccccgctgggagccccacaagcacagaagagggaacttctaccgagccctctgagggctcagcccctggaactagcacagagccctccgaaggcagtgcaccgggtacttccgaaagcgcaactccggaatccggccctggttctgagcctgctacttccggctctgaaactccaggtagcgagccagcgacttctggttctgaaactccaggttcaccggcgggtagcccgacgagcacggaggaaggtacctctgagtcggccactcctgagtccggtccgggcacgagcaccgagccgagcgagggttcagccccgggtaccagcacggagccgtccgagggtagcgcaccgggttctccggcgggctcccctacgtctacggaagagggtacgtccactgaacctagcgagggcagcgcgccaggcaccagcactgaaccgagcgaaggcagcgcacctggcactagcgagtctgcgactccggagagcggtccgggtacgagcacggaaccaagcgaaggcagcgccccaggtacctctgaatctgctaccccagaatctggcccgggttccgagccagctacctctggttctgaaaccccaggtacttccactgaaccaagcgaaggtagcgctcctggcacttctactgaaccatccgaaggttccgctcctggtacgtctgaaagcgctacccctgaaagcggcccaggcacctctgaaagcgctactcctgagagcggtccaggctctccagcaggttctccaacctccactgaagaaggcacctctgagtctgctacccctgaatctggtcctggctccgaacctgctacctctggttccgaaactccaggtacctcggaatctgcgactccggaatctggcccgggcacgagcacggagccgtctgagggtagcgcaccaggtaccagcactgagccttctgagggctctgcaccgggtacctccacggaaccttcggaaggttctgcgccgggtacctccactgagccatccgagggttcagcaccaggtactagcacggaaccgtccgagggctctgcaccaggtacgagcaccgaaccgtcggagggtagcgctccaggtagcccagcgggctctccgacaagcaccgaagaaggcaccagcaccgagccgtccgaaggttccgcaccaggtacaagcgagagcgcgactcctgaatctggtccgggtagcgagcctgcaaccagcggttctgagacgccgggcacttccgaatctgcgaccccggagtccggtccaggttcagagccggcgacgagcggttcggaaacgccgggtacgtctgaatcagccacgccggagtctggtccgggtacctcgaccgaaccaagcgaaggttcggcaccgggtactagcgagagcgcaacccctgaaagcggtccgggcagcccggcaggttctccaaccagcaccgaagaaggttcccctgctggtagcccgacctctacggaggaaggtagccctgcaggttccccaacttctactgaggaaggtacttctgagtccgctaccccagaaagcggtcctggtacctccactgaaccgtctgaaggctctgcaccaggcgccgcagaaccagaggcg

SEQ ID NO: 815 - DNA, 3525 bp, Artificial Sequence
  Description of Artificial Sequence: Synthetic polynucleotide
caccatcatcaccatcactccccagcaggcagcccgaccagcaccgaggagggtacgagcgagtcggctactccagagagcggtccgggtacctctacggaaccgtccgaaggtagcgctccaggcacgtctgaaagcgcgacgccggaaagcggtccaggcagcgagccggcgacctccggtagcgaaacgcctggtacctcggagtcagcgactccggaaagcggtccgggtagcgaacctgcaacgagcggtagcgagactccaggcactagcgaatccgcaactccggagtcgggtccgggcacctctacggagcctagcgagggctcagcaccaggtagccctgcaggttccccgacgtcaaccgaggaaggtacaagcgaaagcgccacccctgagtcgggccctggcagcgaaccggcaactagcggcagcgagactccgggtaccagcgagtctgctacgccagagagcggcccaggttcgccagcgggttcgccgactagcacggaggagggcagcccagcgggtagcccgaccagcactgaggagggtacgtccaccgaaccgagcgaaggtagcgcaccaggtacctccgagtctgccacccctgaatccggtccaggtaccagcgaatcagccaccccggagtcgggtccaggtacgagcgaatctgctaccccggaatccggcccaggcagcgaacctgctactagcggcagcgaaacgccgggcagcgaacctgccacgtcaggcagcgagacgccgggttcccctgcaggctccccgaccagcactgaggagggcacctccaccgaaccatcagaaggtagcgcgcctggtacgtcaaccgaaccttccgagggcagcgcaccgggtggctcagcgcctgaggcaggtcgttctgctaaccatacccctgcaggattaactggccccgccaccagcgggagcgagacccccgggactgacattcagatgactcagtctccgtcctccctgtctgcgagcgtgggcgaccgtgtgactattacctgtaaagcctcccaggacgtgtctatcggtgtggcatggtatcaacaaaagccgggtaaggcacctaaactgctgatctactccgcttcttaccgttacacgggcgttccgtcccgttttagcggttccggtagcggtactgattttaccctgactatttcctccctgcaaccagaagactttgcgacctattactgtcagcaatactatatttacccgtataccttcggccagggcactaaggttgaaattaaaggtgcaacgcctccggagactggtgctgaaactgagtccccgggcgagacgaccggtggctctgctgaatccgaaccaccgggcgaaggcgaggttcagctggtggagtctggcggcggtctggtacagccgggtggtagcctgcgtctgagctgcgcggcgtccggtttcactttcaccgattataccatggactgggttcgccaggcaccgggcaagggtctggaatgggtggcggacgtgaacccgaactccggtggttctatctacaaccagcgtttcaaaggtcgtttcacgctgagcgtagatcgtagcaaaaacactctgtacctgcagatgaactccctgcgcgcagaagacaccgcggtgtattactgtgcacgtaacctgggcccgtccttctatttcgactactggggtcaaggtactctggtaactgtttcctctggtggtggcggcagcgagttagttgtgacccaagagccgagcctgaccgttagcccgggtggtacggtcaccctgacgtgccgtagcagcaacggtgcggtcacgagcagcaactatgccaattgggtccagcagaaaccgggtcaagcaccgcgtggcctgatcggcggcaccaataaacgtgccccgggtactcctgcgcgtttctccggtagcctgctgggcggcaaagccgctctgaccctgagcggtgtccagccggaagatgaagcggtgtactactgcgcgctgtggtatccgaatctgtgggtttttggcggcggtaccaagctgaccgtattgggtgctacgccaccggagactggcgcagaaacggaaagcccgggtgagactacgggtggctctgcggagagcgaacctccgggtgagggtgaggtccaactgctggagtctggtggtggcattgttcaaccgggtggctcgttgaagctgagctgtgcagctagcggctttaccttcaacacctatgcgatgaattgggttcgtcaggcaccgggtaagggcctggaatgggtggcgcgtatccgctccaagtacaacaactacgcgacctactacgcggatagcgttaaagaccgcttcacgattagccgtgacgattccaagaatacggtgtatctgcaaatgaacaatctgaaaaccgaagataccgcggtgtattactgtgtgcgccacgaaaatttcggcaacagctacgtgagctggtttgcacattggggtcagggcaccctggttacggtgagctccgggactgctgaggcggctagcgcctccggagaagctggaagaagcgccaatcacacaccagctggacttacaggcccgcctggtagccccgcggggagccctacaagcactgaggagggcacatctgagtccgctacccctgagagtggacccgggacaagcactgagcctagcgaaggaagcgcaccaggttcccccgctgggagccccacaagcacagaagagggaacttctaccgagccctctgagggctcagcccctggaactagcacagagccctccgaaggcagtgcaccgggtacttccgaaagcgcaactccggaatccggccctggttctgagcctgctacttccggctctgaaactccaggtagcgagccagcgacttctggttctgaaactccaggttcaccggcgggtagcccgacgagcacggaggaaggtacctctgagtcggccactcctgagtccggtccgggcacgagcaccgagccgagcgagggttcagccccgggtaccagcacggagccgtccgagggtagcgcaccgggttctccggcgggctcccctacgtctacggaagagggtacgtccactgaacctagcgagggcagcgcgccaggcaccagcactgaaccgagcgaaggcagcgcacctggcactagcgagtctgcgactccggagagcggtccgggtacgagcacggaaccaagcgaaggcagcgccccaggtacctctgaatctgctaccccagaatctggcccgggttccgagccagctacctctggttctgaaaccccaggtacttccactgaaccaagcgaaggtagcgctcctggcacttctactgaaccatccgaaggttccgctcctggtacgtctgaaagcgctacccctgaaagcggcccaggcacctctgaaagcgctactcctgagagcggtccaggctctccagcaggcgccgcagaaccagaggcg

SEQ ID NO: 816 - DNA, 3060 bp, Artificial Sequence
  Description of Artificial Sequence: Synthetic polynucleotide
caccatcatcaccatcacggttctccggcgggtagcccaactagcaccgaggaaggtactagcgagagcgcaacgccggagtccggtccgggtacgtctacagaacctagcgagggttctgctccgggctctccagcaggctccccgacgagcaccgaggaaggcacttcgaccgagcctagcgagggtagcgcgcctggcaccagcaccgaaccgagcgagggtagcgctccgggcacctctgaaagcgcaaccccagaatccggcccaggctctgagccggcgactagcggttccgagactccgggctcggaaccggcgacgtccggcagcgaaacgccaggttcccctgccggttcgcctaccagcacggaagagggcacttcagagagtgcgacgccagagtcgggtcctggtaccagtaccgagccgagcgagggctcagcgcctgaggcaggtcgttctgctaaccatacccctgcaggattaactggccccgccaccagcgggagcgagacccccgggactgacattcagatgactcagtctccgtcctccctgtctgcgagcgtgggcgaccgtgtgactattacctgtaaagcctcccaggacgtgtctatcggtgtggcatggtatcaacaaaagccgggtaaggcacctaaactgctgatctactccgcttcttaccgttacacgggcgttccgtcccgttttagcggttccggtagcggtactgattttaccctgactatttcctccctgcaaccagaagactttgcgacctattactgtcagcaatactatatttacccgtataccttcggccagggcactaaggttgaaattaaaggtgcaacgcctccggagactggtgctgaaactgagtccccgggcgagacgaccggtggctctgctgaatccgaaccaccgggcgaaggcgaggttcagctggtggagtctggcggcggtctggtacagccgggtggtagcctgcgtctgagctgcgcggcgtccggtttcactttcaccgattataccatggactgggttcgccaggcaccgggcaagggtctggaatgggtggcggacgtgaacccgaactccggtggttctatctacaaccagcgtttcaaaggtcgtttcacgctgagcgtagatcgtagcaaaaacactctgtacctgcagatgaactccctgcgcgcagaagacaccgcggtgtattactgtgcacgtaacctgggcccgtccttctatttcgactactggggtcaaggtactctggtaactgtttcctctggtggtggcggcagcgagttagttgtgacccaagagccgagcctgaccgttagcccgggtggtacggtcaccctgacgtgccgtagcagcaacggtgcggtcacgagcagcaactatgccaattgggtccagcagaaaccgggtcaagcaccgcgtggcctgatcggcggcaccaataaacgtgccccgggtactcctgcgcgtttctccggtagcctgctgggcggcaaagccgctctgaccctgagcggtgtccagccggaagatgaagcggtgtactactgcgcgctgtggtatccgaatctgtgggtttttggcggcggtaccaagctgaccgtattgggtgctacgccaccggagactggcgcagaaacggaaagcccgggtgagactacgggtggctctgcggagagcgaacctccgggtgagggtgaggtccaactgctggagtctggtggtggcattgttcaaccgggtggctcgttgaagctgagctgtgcagctagcggctttaccttcaacacctatgcgatgaattgggttcgtcaggcaccgggtaagggcctggaatgggtggcgcgtatccgctccaagtacaacaactacgcgacctactacgcggatagcgttaaagaccgcttcacgattagccgtgacgattccaagaatacggtgtatctgcaaatgaacaatctgaaaaccgaagataccgcggtgtattactgtgtgcgccacgaaaatttcggcaacagctacgtgagctggtttgcacattggggtcagggcaccctggttacggtgagctccgggactgctgaggcggctagcgcctccggagaagctggaagaagcgccaatcacacaccagctggacttacaggcccgcctggtagccccgcggggagccctacaagcactgaggagggcacatctgagtccgctacccctgagagtggacccgggacaagcactgagcctagcgaaggaagcgcaccaggttcccccgctgggagccccacaagcacagaagagggaacttctaccgagccctctgagggctcagcccctggaactagcacagagccctccgaaggcagtgcaccgggtacttccgaaagcgcaactccggaatccggccctggttctgagcctgctacttccggctctgaaactccaggtagcgagccagcgacttctggttctgaaactccaggttcaccggcgggtagcccgacgagcacggaggaaggtacctctgagtcggccactcctgagtccggtccgggcacgagcaccgagccgagcgagggttcagccccgggtaccagcacggagccgtccgagggtagcgcaccgggttctccggcgggctcccctacgtctacggaagagggtacgtccactgaacctagcgagggcagcgcgccaggcaccagcactgaaccgagcgaaggcagcgcacctggcactagcgagtctgcgactccggagagcggtccgggtacgagcacggaaccaagcgaaggcagcgccccaggtacctctgaatctgctaccccagaatctggcccgggttccgagccagctacctctggttctgaaaccccaggtacttccactgaaccaagcgaaggtagcgctcctggcacttctactgaaccatccgaaggttccgctcctggtacgtctgaaagcgctacccctgaaagcggcccaggcacctctgaaagcgctactcctgagggcgccgcagaaccagaggcg

SEQ ID NO: 817 - DNA, 5229 bp, Artificial Sequence
  Description of Artificial Sequence: Synthetic polynucleotide
caccatcatcaccatcactccccagcaggcagcccgaccagcaccgaggagggtacgagcgagtcggctactccagagagcggtccgggtacctctacggaaccgtccgaaggtagcgctccaggcacgtctgaaagcgcgacgccggaaagcggtccaggcagcgagccggcgacctccggtagcgaaacgcctggtacctcggagtcagcgactccggaaagcggtccgggtagcgaacctgcaacgagcggtagcgagactccaggcactagcgaatccgcaactccggagtcgggtccgggcacctctacggagcctagcgagggctcagcaccaggtagccctgcaggttccccgacgtcaaccgaggaaggtacaagcgaaagcgccacccctgagtcgggccctggcagcgaaccggcaactagcggcagcgagactccgggtaccagcgagtctgctacgccagagagcggcccaggttcgccagcgggttcgccgactagcacggaggagggcagcccagcgggtagcccgaccagcactgaggagggtacgtccaccgaaccgagcgaaggtagcgcaccaggtacctccgagtctgccacccctgaatccggtccaggtaccagcgaatcagccaccccggagtcgggtccaggtacgagcgaatctgctaccccggaatccggcccaggcagcgaacctgctactagcggcagcgaaacgccgggcagcgaacctgccacgtcaggcagcgagacgccgggttcccctgcaggctccccgaccagcactgaggagggcacctccaccgaaccatcagaaggtagcgcgcctggtacgtcaaccgaaccttccgagggcagcgcaccgggtggctcagcgcctgaggcaggtcgttctgctaaccataccccagcggggctgactgggcctgctacctcaggctccgaaaccccgggcaccgacatccaaatgacccagagcccgagcagcctgagcgcgagcgtgggcgaccgtgttaccatcacctgccaagcgagccaagacatcagcaactacctgaactggtatcagcaaaagccgggcaaagcgccgaagctgctgatctacgacgcgagcaacctggaaaccggtgtgccgagccgtttcagcggtagcggtagcggtaccgatttcacctttaccatcagcagcctgcaaccggaggacatcgcgacctatttctgccagcactttgatcacctgccgctggcgtttggtggcggtaccaaagttgagattaaaggtgcaacgcctccggagactggtgctgaaactgagtccccgggcgagacgaccggtggctctgctgaatccgaaccaccgggcgaaggccaggtgcaactgcaggaaagcggtccgggcctggttaaaccgagcgaaaccctgagcctgacctgcaccgtgagcggcggtagcgttagcagcggtgactactattggacctggatccgtcaaagcccgggtaaaggcctggagtggatcggtcacatttactatagcggcaacaccaactacaacccgagcctgaagagccgtctgaccatcagcattgacaccagcaaaacccagttcagcctgaaactgagcagcgtgaccgcggcggataccgcgatttactattgcgttcgtgatcgtgttaccggcgcgttcgacatctggggtcagggcaccatggttaccgttagcagcggtggtggcggcagcgagttagttgtgacccaagagccgagcctgaccgttagcccgggtggtacggtcaccctgacgtgccgtagcagcaccggtgcggtcacgaccagcaactatgccaattgggtccagcagaaaccgggtcaagcaccgcgtggcctgatcggcggcaccaataaacgtgccccgggtactcctgcgcgtttctccggtagcctgctgggcggcaaagccgctctgaccctgagcggtgtccagccggaagatgaagcggagtactactgcgcgctgtggtattccaatctgtgggtttttggcggcggtaccaagctgaccgtattgggtgctacgccaccggagactggcgcagaaacggaaagcccgggtgagactacgggtggctctgcggagagcgaacctccgggtgagggtgaggtccaactgctggagtctggtggtggcctggttcaaccgggtggctcgttgaagctgagctgtgcagctagcggctttaccttcaacacctatgcgatgaattgggttcgtcaggcaccgggtaagggcctggaatgggtggcgcgtatccgctccaagtacaacaactacgcgacctactacgcggatagcgttaaagaccgcttcacgattagccgtgacgattccaagaatacggcatatctgcaaatgaacaatctgaaaaccgaagataccgcggtgtattactgtgtgcgccacggcaatttcggcaacagctacgtgagctggtttgcatattggggtcagggcaccctggttacggtgagctccggcaccgccgaagcagctagcgcctctggcgaggcaggtcgttctgctaaccataccccagcggggctgactgggcctccaggtagcccagctggtagcccaacctctaccgaagaaggtacctctgaatccgctactccagaatccggtcctggtactagcactgagccaagcgaaggttctgctccaggctccccggcaggtagccctacctctaccgaagagggcactagcaccgaaccatctgagggttccgctcctggcacctccactgaaccgtccgaaggcagtgctccgggtacttccgaaagcgcaactccggaatccggccctggttctgagcctgctacttccggctctgaaactccaggtagcgagccagcgacttctggttctgaaactccaggttcaccggcgggtagcccgacgagcacggaggaaggtacctctgagtcggccactcctgagtccggtccgggcacgagcaccgagccgagcgagggttcagccccgggtaccagcacggagccgtccgagggtagcgcaccgggttctccggcgggctcccctacgtctacggaagagggtacgtccactgaacctagcgagggcagcgcgccaggcaccagcactgaaccgagcgaaggcagcgcacctggcactagcgagtctgcgactccggagagcggtccgggtacgagcacggaaccaagcgaaggcagcgccccaggtacctctgaatctgctaccccagaatctggcccgggttccgagccagctacctctggttctgaaaccccaggtacttccactgaaccaagcgaaggtagcgctcctggcacttctactgaaccatccgaaggttccgctcctggtacgtctgaaagcgctacccctgaaagcggcccaggcacctctgaaagcgctactcctgagagcggtccaggctctccagcaggttctccaacctccactgaagaaggcacctctgagtctgctacccctgaatctggtcctggctccgaacctgctacctctggttccgaaactccaggtacctcggaatctgcgactccggaatctggcccgggcacgagcacggagccgtctgagggtagcgcaccaggtaccagcactgagccttctgagggctctgcaccgggtacctccacggaaccttcggaaggttctgcgccgggtacctccactgagccatccgagggttcagcaccaggtactagcacggaaccgtccgagggctctgcaccaggtacgagcaccgaaccgtcggagggtagcgctccaggtagcccagcgggctctccgacaagcaccgaagaaggcaccagcaccgagccgtccgaaggttccgcaccaggtacaagcgagagcgcgactcctgaatctggtccgggtagcgagcctgcaaccagcggttctgagacgccgggcacttccgaatctgcgaccccggagtccggtccaggttcagagccggcgacgagcggttcggaaacgccgggtacgtctgaatcagccacgccggagtctggtccgggtacctcgaccgaaccaagcgaaggttcggcaccgggtactagcgagagcgcaacccctgaaagcggtccgggcagcccggcaggttctccaaccagcaccgaagaaggttcccctgctggtagcccgacctctacggaggaaggtagccctgcaggttccccaacttctactgaggaaggtacttctgagtccgctaccccagaaagcggtcctggtacctccactgaaccgtctgaaggctctgcaccaggcacttctgagtctgctactccagaaagcggcccaggttctgaaccagcaacttctggctctgagactccaggcacttctgagtccgcaacgcctgaatccggtcctggttctgaaccagctacttccggcagcgaaaccccaggtacctctgagtctgcgactccagagtctggtcctggtacttccactgagcctagcgagggttccgcaccaggttctccggctggtagcccgaccagcacggaggagggtacgtctgaatctgcaacgccggaatcgggcccaggttcggagcctgcaacgtctggcagcgaaaccccgggtacctccgaatctgctacaccggaaagcggtcctggcagccctgctggttctccaacctctaccgaggagggttcaccggcaggtagcccgactagcactgaagaaggtactagcacggagccgagcgagggtagtgctccgggtacgagcgagagcgcaacgccagagagcggtccaggcaccagcgaatcggccacccctgagagcggcccaggtacttctgagagcgccactcctgaatccggccctggtagcgagccggcaacctccggctcagaaactcctggttcggaaccagcgaccagcggttctgaaactccgggtagcccggcaggcagcccaacgagcaccgaagagggtaccagcacggaaccgagcgagggttctgccccgggtacttccaccgaaccatcggagggctctgcacctggtagcgaacctgcgacgtctggttctgaaacgccgggtaccagcgaaagcgctaccccagaatccggtccgggcactagcaccgagccatcggagggcgccgcagaaccagaggcg

SEQ ID NO: 818 - DNA, 5229 bp, Artificial Sequence
  Description of Artificial Sequence: Synthetic polynucleotide
caccatcatcaccatcactccccagcaggcagcccgaccagcaccgaggagggtacgagcgagtcggctactccagagagcggtccgggtacctctacggaaccgtccgaaggtagcgctccaggcacgtctgaaagcgcgacgccggaaagcggtccaggcagcgagccggcgacctccggtagcgaaacgcctggtacctcggagtcagcgactccggaaagcggtccgggtagcgaacctgcaacgagcggtagcgagactccaggcactagcgaatccgcaactccggagtcgggtccgggcacctctacggagcctagcgagggctcagcaccaggtagccctgcaggttccccgacgtcaaccgaggaaggtacaagcgaaagcgccacccctgagtcgggccctggcagcgaaccggcaactagcggcagcgagactccgggtaccagcgagtctgctacgccagagagcggcccaggttcgccagcgggttcgccgactagcacggaggagggcagcccagcgggtagcccgaccagcactgaggagggtacgtccaccgaaccgagcgaaggtagcgcaccaggtacctccgagtctgccacccctgaatccggtccaggtaccagcgaatcagccaccccggagtcgggtccaggtacgagcgaatctgctaccccggaatccggcccaggcagcgaacctgctactagcggcagcgaaacgccgggcagcgaacctgccacgtcaggcagcgagacgccgggttcccctgcaggctccccgaccagcactgaggagggcacctccaccgaaccatcagaaggtagcgcgcctggtacgtcaaccgaaccttccgagggcagcgcaccgggtggctcagcgcctgaggcaggtcgttctgctaaccatacccctgcaggattaactggccccgccaccagcgggagcgagacccccgggactgatatccagatgacccaaagccctagttcattaagcgcatcggtgggtgaccgggtaaccattacctgtcaagcaagtcaggatatcagcaactacctgaactggtaccagcagaaacccggaaaagcgccgaaactgctgatctatgatgccagcaatctggaaacaggtgttcctagccgtttctctggatcaggttcaggaaccgattttacattcaccattagctcattacagccggaggataccgcgacgtatttttgccagcacttcgatcatctgcctttagcatttggcggcggtactaaagtggagatcaaaggagcgacgccgcctgagactggagcagagaccgaatcacctggtgagacgacgggcgggtcagccgaaagcgagccaccgggggaagggcaggttcaattgcaagaaagtggaccgggcgccgtcaaacccagcgaaaccctctccctgacctgcacagtcagcggagggtctgtgagctcaggcgactactattggacctggattagacaatcaccaggtaaaggtcttgagtggattggccacatctactatagcggtaacaccaactataatccgagcctgaaaagtcgtctgaccatcagcatcgacaccagcaaaacccagtttagcctgaaattaagcagcgttacagcagcggatacagcgacctactattgtgtccgtgatcgcgttactggcgcatttgatatttgggggcagggaacagcagttactgtgtcaagtggaggaggtggcagtgaactggttgttacacaagaaccgtccttaacagttagtccggggggcaccgtcacattaacatgtcgttcaagtacaggtgcagtaaccacgtccaactatgcaaattgggttcaacagaagcccggacaggccccgagaggtttaataggtggaacaaacaaaagagcacctggtacacctgcccggttctccggatcctctctcggcggttccgcagcattaaccttaagtggtgttcagccggaagatgaagcggagtattactgcgcactttggtatagcaacttatgggtgtttggaggcggtacaaaattgaccgttctgggtgcgacgccgcccgaaacgggcgcggagacggagtccccaggtgaaaccactggtggaagcgcagaatcagagccaccgggcgagggggaagtacaattacaggagtccggcggaggtctggttcagcctggtggtagcctcaaactgtcctgcgcagcaagcggttttacctttaacacctacgccatgaactgggtgcgtcaagctcctggtaaaggcttagaatgggttgcgcgtattcgtagcaaatacaacaactatgccacctattacgcggacagtgtaaaagaccgtttcaccatcagccgcgatgatagcaaaaatacagcctatctgcagatgaacaacctgaagaccgaagacacggccgtctactactgcgtgcgtcatggcaattttggcaacagctatgttagctggttcgcgtattggggccagggaacactggtcacggtttcctcagggactgctgaggcggctagcgcctccggagaagctggaagaagcgccaatcacacaccagctggacttacaggcccgcctggtagccccgcggggagccctacaagcactgaggagggcacatctgagtccgctacccctgagagtggacccgggacaagcactgagcctagcgaaggaagcgcaccaggttcccccgctgggagccccacaagcacagaagagggaacttctaccgagccctctgagggctcagcccctggaactagcacagagccctccgaaggcagtgcaccgggtacttccgaaagcgcaactccggaatccggccctggttctgagcctgctacttccggctctgaaactccaggtagcgagccagcgacttctggttctgaaactccaggttcaccggcgggtagcccgacgagcacggaggaaggtacctctgagtcggccactcctgagtccggtccgggcacgagcaccgagccgagcgagggttcagccccgggtaccagcacggagccgtccgagggtagcgcaccgggttctccggcgggctcccctacgtctacggaagagggtacgtccactgaacctagcgagggcagcgcgccaggcaccagcactgaaccgagcgaaggcagcgcacctggcactagcgagtctgcgactccggagagcggtccgggtacgagcacggaaccaagcgaaggcagcgccccaggtacctctgaatctgctaccccagaatctggcccgggttccgagccagctacctctggttctgaaaccccaggtacttccactgaaccaagcgaaggtagcgctcctggcacttctactgaaccatccgaaggttccgctcctggtacgtctgaaagcgctacccctgaaagcggcccaggcacctctgaaagcgctactcctgagagcggtccaggctctccagcaggttctccaacctccactgaagaaggcacctctgagtctgctacccctgaatctggtcctggctccgaacctgctacctctggttccgaaactccaggtacctcggaatctgcgactccggaatctggcccgggcacgagcacggagccgtctgagggtagcgcaccaggtaccagcactgagccttctgagggctctgcaccgggtacctccacggaaccttcggaaggttctgcgccgggtacctccactgagccatccgagggttcagcaccaggtactagcacggaaccgtccgagggctctgcaccaggtacgagcaccgaaccgtcggagggtagcgctccaggtagcccagcgggctctccgacaagcaccgaagaaggcaccagcaccgagccgtccgaaggttccgcaccaggtacaagcgagagcgcgactcctgaatctggtccgggtagcgagcctgcaaccagcggttctgagacgccgggcacttccgaatctgcgaccccggagtccggtccaggttcagagccggcgacgagcggttcggaaacgccgggtacgtctgaatcagccacgccggagtctggtccgggtacctcgaccgaaccaagcgaaggttcggcaccgggtactagcgagagcgcaacccctgaaagcggtccgggcagcccggcaggttctccaaccagcaccgaagaaggttcccctgctggtagcccgacctctacggaggaaggtagccctgcaggttccccaacttctactgaggaaggtacttctgagtccgctaccccagaaagcggtcctggtacctccactgaaccgtctgaaggctctgcaccaggcacttctgagtctgctactccagaaagcggcccaggttctgaaccagcaacttctggctctgagactccaggcacttctgagtccgcaacgcctgaatccggtcctggttctgaaccagctacttccggcagcgaaaccccaggtacctctgagtctgcgactccagagtctggtcctggtacttccactgagcctagcgagggttccgcaccaggttctccggctggtagcccgaccagcacggaggagggtacgtctgaatctgcaacgccggaatcgggcccaggttcggagcctgcaacgtctggcagcgaaaccccgggtacctccgaatctgctacaccggaaagcggtcctggcagccctgctggttctccaacctctaccgaggagggttcaccggcaggtagcccgactagcactgaagaaggtactagcacggagccgagcgagggtagtgctccgggtacgagcgagagcgcaacgccagagagcggtccaggcaccagcgaatcggccacccctgagagcggcccaggtacttctgagagcgccactcctgaatccggccctggtagcgagccggcaacctccggctcagaaactcctggttcggaaccagcgaccagcggttctgaaactccgggtagcccggcaggcagcccaacgagcaccgaagagggtaccagcacggaaccgagcgagggttctgccccgggtacttccaccgaaccatcggagggctctgcacctggtagcgaacctgcgacgtctggttctgaaacgccgggtaccagcgaaagcgctaccccagaatccggtccgggcactagcaccgagccatcggagggcgccgcagaaccagaggcg

SEQ ID NO: 819 - DNA, 5229 bp, Artificial Sequence
  Description of Artificial Sequence: Synthetic polynucleotide
caccatcatcaccatcactccccagcaggcagcccgaccagcaccgaggagggtacgagcgagtcggctactccagagagcggtccgggtacctctacggaaccgtccgaaggtagcgctccaggcacgtctgaaagcgcgacgccggaaagcggtccaggcagcgagccggcgacctccggtagcgaaacgcctggtacctcggagtcagcgactccggaaagcggtccgggtagcgaacctgcaacgagcggtagcgagactccaggcactagcgaatccgcaactccggagtcgggtccgggcacctctacggagcctagcgagggctcagcaccaggtagccctgcaggttccccgacgtcaaccgaggaaggtacaagcgaaagcgccacccctgagtcgggccctggcagcgaaccggcaactagcggcagcgagactccgggtaccagcgagtctgctacgccagagagcggcccaggttcgccagcgggttcgccgactagcacggaggagggcagcccagcgggtagcccgaccagcactgaggagggtacgtccaccgaaccgagcgaaggtagcgcaccaggtacctccgagtctgccacccctgaatccggtccaggtaccagcgaatcagccaccccggagtcgggtccaggtacgagcgaatctgctaccccggaatccggcccaggcagcgaacctgctactagcggcagcgaaacgccgggcagcgaacctgccacgtcaggcagcgagacgccgggttcccctgcaggctccccgaccagcactgaggagggcacctccaccgaaccatcagaaggtagcgcgcctggtacgtcaaccgaaccttccgagggcagcgcaccgggtggctcagcgcctgaggcaggtcgttctgctaaccatacccctgcaggattaactggccccgccaccagcgggagcgagacccccgggactgatatccagatgacccaaagccctagttcattaagcgcatcggtgggtgaccgggtaaccattacctgtcaagcaagtcaggatatcagcaactacctgaactggtaccagcagaaacccggaaaagcgccgaaactgctgatctatgatgccagcaatctggaaacaggtgttcctagccgtttctctggatcaggttcaggaaccgattttacattcaccattagctcattacagccggaggataccgcgacgtatttttgccagcacttcgatcatctgcctttagcatttggcggcggtactaaagtggagatcaaaggagcgacgccgcctgagactggagcagagaccgaatcacctggtgagacgacgggcgggtcagccgaaagcgagccaccgggggaagggcaggttcaattgcaagaaagtggaccgggcgccgtcaaacccagcgaaaccctctccctgacctgcacagtcagcggagggtctgtgagctcaggcgactactattggacctggattagacaatcaccaggtaaaggtcttgagtggattggccacatctactatagcggtaacaccaactataatccgagcctgaaaagtcgtctgaccatcagcatcgacaccagcaaaacccagtttagcctgaaattaagcagcgttacagcagcggatacagcgacctactattgtgtccgtgatcgcgttactggcgcatttgatatttgggggcagggaacaacagttactgtgtcaagtggaggaggtggcagtgaactggttgttacacaagaaccgtccttaacagttagtccggggggcaccgtcacattaacatgtcgttcaagtacaggtgcagtaaccacgtccaactatgcaaattgggttcaacagaagcccggacaggccccgagaggtttaataggtggaacaaacaaaagagcacctggtacacctgcccggttctccggatcctctctcggcggttccgcagcattaaccttaagtggtgttcagccggaagatgaagcggagtattactgcgcactttggtatagcaacttatgggtgtttggaggcggtacaaaattgaccgttctgggtgcgacgccgcccgaaacgggcgcggagacggagtccccaggtgaaaccactggtggaagcgcagaatcagagccaccgggcgagggggaagtacaattacaggagtccggcggaggtctggttcagcctggtggtagcctcaaactgtcctgcgcagcaagcggttttacctttaacacctacgccatgaactgggtgcgtcaagctcctggtaaaggcttagaatgggttgcgcgtattcgtagcaaatacaacaactatgccacctattacgcggacagtgtaaaagaccgtttcaccatcagccgcgatgatagcaaaaatacagcctatctgcagatgaacaacctgaagaccgaagacacggccgtctactactgcgtgcgtcatggcaattttggcaacagctatgttagctggttcgcgtattggggccagggaacactggtcacggtttcctcagggactgctgaggcggctagcgcctccggagaagctggaagaagcgccaatcacacaccagctggacttacaggcccgcctggtagccccgcggggagccctacaagcactgaggagggcacatctgagtccgctacccctgagagtggacccgggacaagcactgagcctagcgaaggaagcgcaccaggttcccccgctgggagccccacaagcacagaagagggaacttctaccgagccctctgagggctcagcccctggaactagcacagagccctccgaaggcagtgcaccgggtacttccgaaagcgcaactccggaatccggccctggttctgagcctgctacttccggctctgaaactccaggtagcgagccagcgacttctggttctgaaactccaggttcaccggcgggtagcccgacgagcacggaggaaggtacctctgagtcggccactcctgagtccggtccgggcacgagcaccgagccgagcgagggttcagccccgggtaccagcacggagccgtccgagggtagcgcaccgggttctccggcgggctcccctacgtctacggaagagggtacgtccactgaacctagcgagggcagcgcgccaggcaccagcactgaaccgagcgaaggcagcgcacctggcactagcgagtctgcgactccggagagcggtccgggtacgagcacggaaccaagcgaaggcagcgccccaggtacctctgaatctgctaccccagaatctggcccgggttccgagccagctacctctggttctgaaaccccaggtacttccactgaaccaagcgaaggtagcgctcctggcacttctactgaaccatccgaaggttccgctcctggtacgtctgaaagcgctacccctgaaagcggcccaggcacctctgaaagcgctactcctgagagcggtccaggctctccagcaggttctccaacctccactgaagaaggcacctctgagtctgctacccctgaatctggtcctggctccgaacctgctacctctggttccgaaactccaggtacctcggaatctgcgactccggaatctggcccgggcacgagcacggagccgtctgagggtagcgcaccaggtaccagcactgagccttctgagggctctgcaccgggtacctccacggaaccttcggaaggttctgcgccgggtacctccactgagccatccgagggttcagcaccaggtactagcacggaaccgtccgagggctctgcaccaggtacgagcaccgaaccgtcggagggtagcgctccaggtagcccagcgggctctccgacaagcaccgaagaaggcaccagcaccgagccgtccgaaggttccgcaccaggtacaagcgagagcgcgactcctgaatctggtccgggtagcgagcctgcaaccagcggttctgagacgccgggcacttccgaatctgcgaccccggagtccggtccaggttcagagccggcgacgagcggttcggaaacgccgggtacgtctgaatcagccacgccggagtctggtccgggtacctcgaccgaaccaagcgaaggttcggcaccgggtactagcgagagcgcaacccctgaaagcggtccgggcagcccggcaggttctccaaccagcaccgaagaaggttcccctgctggtagcccgacctctacggaggaaggtagccctgcaggttccccaacttctactgaggaaggtacttctgagtccgctaccccagaaagcggtcctggtacctccactgaaccgtctgaaggctctgcaccaggcacttctgagtctgctactccagaaagcggcccaggttctgaaccagcaacttctggctctgagactccaggcacttctgagtccgcaacgcctgaatccggtcctggttctgaaccagctacttccggcagcgaaaccccaggtacctctgagtctgcgactccagagtctggtcctggtacttccactgagcctagcgagggttccgcaccaggttctccggctggtagcccgaccagcacggaggagggtacgtctgaatctgcaacgccggaatcgggcccaggttcggagcctgcaacgtctggcagcgaaaccccgggtacctccgaatctgctacaccggaaagcggtcctggcagccctgctggttctccaacctctaccgaggagggttcaccggcaggtagcccgactagcactgaagaaggtactagcacggagccgagcgagggtagtgctccgggtacgagcgagagcgcaacgccagagagcggtccaggcaccagcgaatcggccacccctgagagcggcccaggtacttctgagagcgccactcctgaatccggccctggtagcgagccggcaacctccggctcagaaactcctggttcggaaccagcgaccagcggttctgaaactccgggtagcccggcaggcagcccaacgagcaccgaagagggtaccagcacggaaccgagcgagggttctgccccgggtacttccaccgaaccatcggagggctctgcacctggtagcgaacctgcgacgtctggttctgaaacgccgggtaccagcgaaagcgctaccccagaatccggtccgggcactagcaccgagccatcggagggcgccgcagaaccagaggcg

SEQ ID NO: 820 - DNA, 5229 bp, Artificial Sequence
  Description of Artificial Sequence: Synthetic polynucleotide
caccatcatcaccatcactccccagcaggcagcccgaccagcaccgaggagggtacgagcgagtcggctactccagagagcggtccgggtacctctacggaaccgtccgaaggtagcgctccaggcacgtctgaaagcgcgacgccggaaagcggtccaggcagcgagccggcgacctccggtagcgaaacgcctggtacctcggagtcagcgactccggaaagcggtccgggtagcgaacctgcaacgagcggtagcgagactccaggcactagcgaatccgcaactccggagtcgggtccgggcacctctacggagcctagcgagggctcagcaccaggtagccctgcaggttccccgacgtcaaccgaggaaggtacaagcgaaagcgccacccctgagtcgggccctggcagcgaaccggcaactagcggcagcgagactccgggtaccagcgagtctgctacgccagagagcggcccaggttcgccagcgggttcgccgactagcacggaggagggcagcccagcgggtagcccgaccagcactgaggagggtacgtccaccgaaccgagcgaaggtagcgcaccaggtacctccgagtctgccacccctgaatccggtccaggtaccagcgaatcagccaccccggagtcgggtccaggtacgagcgaatctgctaccccggaatccggcccaggcagcgaacctgctactagcggcagcgaaacgccgggcagcgaacctgccacgtcaggcagcgagacgccgggttcccctgcaggctccccgaccagcactgaggagggcacctccaccgaaccatcagaaggtagcgcgcctggtacgtcaaccgaaccttccgagggcagcgcaccgggtggctcagcgcctgaggcaggtcgttctgctaaccatacccctgcaggattaactggccccgccaccagcgggagcgagacccccgggactgatatccagatgacccaaagccctagttcattaagcgcatcggtgggtgaccgggtaaccattacctgtcaagcaagtcaggatatcagcaactacctgaactggtaccagcagaaacccggaaaagcgccgaaactgctgatctatgatgccagcaatctggaaacaggtgttcctagccgtttctctggatcaggttcaggaaccgattttacattcaccattagctcattacagccggaggataccgcgacgtatttttgccagcacttcgatcatctgcctttagcatttggcggcggtactaaagtggagatcaaaggagcgacgccgcctgagactggagcagagaccgaatcacctggtgagacgacgggcgggtcagccgaaagcgagccaccgggggaagggcaggttcaattgcaagaaagtggaccgggcttagtcaaacccagccagaccctctccctgacctgcacagtcagcggagggtctgtgagctcaggcgactactattggacctggattagacaacgtccaggtaaaggtcttgagtggattggccacatctactatagcggtaacaccaactataatccgagcctgaaaagtcgtctgaccatcagcatcgacaccagcaaaacccagtttagcctgaaattaagcagcgttacagcagcggatacagcgatttactattgtgtccgtgatcgcgttactggcgcatttgatatttgggggcagggaacaatggttactgtgtcaagtggaggaggtggcagtgaactggttgttacacaagaaccgtccttaacagttagtccggggggcaccgtcacattaacatgtcgttcaagtacaggtgcagtaaccacgtccaactatgcaaattgggttcaacagaagcccggacaggccccgagaggtttaataggtggaacaaacaaaagagcacctggtacacctgcccggttctccggatcctctctcggcggttccgcagcattaaccttaagtggtgttcagccggaagatgaagcggagtattactgcgcactttggtatagcaacttatgggtgtttggaggcggtacaaaattgaccgttctgggtgcgacgccgcccgaaacgggcgcggagacggagtccccaggtgaaaccactggtggaagcgcagaatcagagccaccgggcgagggggaagtacaattacaggagtccggcggaggtctggttcagcctggtggtagcctcaaactgtcctgcgcagcaagcggttttacctttaacacctacgccatgaactgggtgcgtcaagctcctggtaaaggcttagaatgggttgcgcgtattcgtagcaaatacaacaactatgccacctattacgcggacagtgtaaaagaccgtttcaccatcagccgcgatgatagcaaaaatacagcctatctgcagatgaacaacctgaagaccgaagacacggccgtctactactgcgtgcgtcatggcaattttggcaacagctatgttagctggttcgcgtattggggccagggaacactggtcacggtttcctcagggactgctgaggcggctagcgcctccggagaagctggaagaagcgccaatcacacaccagctggacttacaggcccgcctggtagccccgcggggagccctacaagcactgaggagggcacatctgagtccgctacccctgagagtggacccgggacaagcactgagcctagcgaaggaagcgcaccaggttcccccgctgggagccccacaagcacagaagagggaacttctaccgagccctctgagggctcagcccctggaactagcacagagccctccgaaggcagtgcaccgggtacttccgaaagcgcaactccggaatccggccctggttctgagcctgctacttccggctctgaaactccaggtagcgagccagcgacttctggttctgaaactccaggttcaccggcgggtagcccgacgagcacggaggaaggtacctctgagtcggccactcctgagtccggtccgggcacgagcaccgagccgagcgagggttcagccccgggtaccagcacggagccgtccgagggtagcgcaccgggttctccggcgggctcccctacgtctacggaagagggtacgtccactgaacctagcgagggcagcgcgccaggcaccagcactgaaccgagcgaaggcagcgcacctggcactagcgagtctgcgactccggagagcggtccgggtacgagcacggaaccaagcgaaggcagcgccccaggtacctctgaatctgctaccccagaatctggcccgggttccgagccagctacctctggttctgaaaccccaggtacttccactgaaccaagcgaaggtagcgctcctggcacttctactgaaccatccgaaggttccgctcctggtacgtctgaaagcgctacccctgaaagcggcccaggcacctctgaaagcgctactcctgagagcggtccaggctctccagcaggttctccaacctccactgaagaaggcacctctgagtctgctacccctgaatctggtcctggctccgaacctgctacctctggttccgaaactccaggtacctcggaatctgcgactccggaatctggcccgggcacgagcacggagccgtctgagggtagcgcaccaggtaccagcactgagccttctgagggctctgcaccgggtacctccacggaaccttcggaaggttctgcgccgggtacctccactgagccatccgagggttcagcaccaggtactagcacggaaccgtccgagggctctgcaccaggtacgagcaccgaaccgtcggagggtagcgctccaggtagcccagcgggctctccgacaagcaccgaagaaggcaccagcaccgagccgtccgaaggttccgcaccaggtacaagcgagagcgcgactcctgaatctggtccgggtagcgagcctgcaaccagcggttctgagacgccgggcacttccgaatctgcgaccccggagtccggtccaggttcagagccggcgacgagcggttcggaaacgccgggtacgtctgaatcagccacgccggagtctggtccgggtacctcgaccgaaccaagcgaaggttcggcaccgggtactagcgagagcgcaacccctgaaagcggtccgggcagcccggcaggttctccaaccagcaccgaagaaggttcccctgctggtagcccgacctctacggaggaaggtagccctgcaggttccccaacttctactgaggaaggtacttctgagtccgctaccccagaaagcggtcctggtacctccactgaaccgtctgaaggctctgcaccaggcacttctgagtctgctactccagaaagcggcccaggttctgaaccagcaacttctggctctgagactccaggcacttctgagtccgcaacgcctgaatccggtcctggttctgaaccagctacttccggcagcgaaaccccaggtacctctgagtctgcgactccagagtctggtcctggtacttccactgagcctagcgagggttccgcaccaggttctccggctggtagcccgaccagcacggaggagggtacgtctgaatctgcaacgccggaatcgggcccaggttcggagcctgcaacgtctggcagcgaaaccccgggtacctccgaatctgctacaccggaaagcggtcctggcagccctgctggttctccaacctctaccgaggagggttcaccggcaggtagcccgactagcactgaagaaggtactagcacggagccgagcgagggtagtgctccgggtacgagcgagagcgcaacgccagagagcggtccaggcaccagcgaatcggccacccctgagagcggcccaggtacttctgagagcgccactcctgaatccggccctggtagcgagccggcaacctccggctcagaaactcctggttcggaaccagcgaccagcggttctgaaactccgggtagcccggcaggcagcccaacgagcaccgaagagggtaccagcacggaaccgagcgagggttctgccccgggtacttccaccgaaccatcggagggctctgcacctggtagcgaacctgcgacgtctggttctgaaacgccgggtaccagcgaaagcgctaccccagaatccggtccgggcactagcaccgagccatcggagggcgccgcagaaccagaggcg

SEQ ID NO: 821 - DNA, 5229 bp, Artificial Sequence
  Description of Artificial Sequence: Synthetic polynucleotide
caccatcatcaccatcactccccagcaggcagcccgaccagcaccgaggagggtacgagcgagtcggctactccagagagcggtccgggtacctctacggaaccgtccgaaggtagcgctccaggcacgtctgaaagcgcgacgccggaaagcggtccaggcagcgagccggcgacctccggtagcgaaacgcctggtacctcggagtcagcgactccggaaagcggtccgggtagcgaacctgcaacgagcggtagcgagactccaggcactagcgaatccgcaactccggagtcgggtccgggcacctctacggagcctagcgagggctcagcaccaggtagccctgcaggttccccgacgtcaaccgaggaaggtacaagcgaaagcgccacccctgagtcgggccctggcagcgaaccggcaactagcggcagcgagactccgggtaccagcgagtctgctacgccagagagcggcccaggttcgccagcgggttcgccgactagcacggaggagggcagcccagcgggtagcccgaccagcactgaggagggtacgtccaccgaaccgagcgaaggtagcgcaccaggtacctccgagtctgccacccctgaatccggtccaggtaccagcgaatcagccaccccggagtcgggtccaggtacgagcgaatctgctaccccggaatccggcccaggcagcgaacctgctactagcggcagcgaaacgccgggcagcgaacctgccacgtcaggcagcgagacgccgggttcccctgcaggctccccgaccagcactgaggagggcacctccaccgaaccatcagaaggtagcgcgcctggtacgtcaaccgaaccttccgagggcagcgcaccgggtggctcagcgcctgaggcaggtcgttctgctaaccatacccctgcaggattaactggccccgccaccagcgggagcgagacccccgggactgatatccagatgacccaaagccctagttcattaagcgcatcggtgggtgaccgggtaaccattacctgtcaagcaagtcaggatatcagcaactacctgaactggtaccagcagaaacccggaaaagcgccgaaactgctgatctatgatgccagcaatctggaaacaggtgttcctagccgtttctctggatcaggttcaggaaccgattttacattcaccattagctcattacagccggaggataccgcgacgtatttttgccagcacttcgatcatctgcctttagcatttggcggcggtactaaagtggagatcaaaggagcgacgccgcctgagactggagcagagaccgaatcacctggtgagacgacgggcgggtcagccgaaagcgagccaccgggggaagggcaggttcaattgcaagaaagtggaccgggcgccgtcaaacccagccagaccctctccctgacctgcacagtcagcggagggtctgtgagctcaggcgactactattggacctggattagacaacgtccaggtaaaggtcttgagtggattggccacatctactatagcggtaacaccaactataatccgagcctgaaaagtcgtctgaccatcagcatcgacaccagcaaaacccagtttagcctgaaattaagcagcgttacagcagcggatacagcgacctactattgtgtccgtgatcgcgttactggcgcatttgatatttgggggcagggaacagcagttactgtgtcaagtggaggaggtggcagtgaactggttgttacacaagaaccgtccttaacagttagtccggggggcaccgtcacattaacatgtcgttcaagtacaggtgcagtaaccacgtccaactatgcaaattgggttcaacagaagcccggacaggccccgagaggtttaataggtggaacaaacaaaagagcacctggtacacctgcccggttctccggatcctctctcggcggttccgcagcattaaccttaagtggtgttcagccggaagatgaagcggagtattactgcgcactttggtatagcaacttatgggtgtttggaggcggtacaaaattgaccgttctgggtgcgacgccgcccgaaacgggcgcggagacggagtccccaggtgaaaccactggtggaagcgcagaatcagagccaccgggcgagggggaagtacaattacaggagtccggcggaggtctggttcagcctggtggtagcctcaaactgtcctgcgcagcaagcggttttacctttaacacctacgccatgaactgggtgcgtcaagctcctggtaaaggcttagaatgggttgcgcgtattcgtagcaaatacaacaactatgccacctattacgcggacagtgtaaaagaccgtttcaccatcagccgcgatgatagcaaaaatacagcctatctgcagatgaacaacctgaagaccgaagacacggccgtctactactgcgtgcgtcatggcaattttggcaacagctatgttagctggttcgcgtattggggccagggaacactggtcacggtttcctcagggactgctgaggcggctagcgcctccggagaagctggaagaagcgccaatcacacaccagctggacttacaggcccgcctggtagccccgcggggagccctacaagcactgaggagggcacatctgagtccgctacccctgagagtggacccgggacaagcactgagcctagcgaaggaagcgcaccaggttcccccgctgggagccccacaagcacagaagagggaacttctaccgagccctctgagggctcagcccctggaactagcacagagccctccgaaggcagtgcaccgggtacttccgaaagcgcaactccggaatccggccctggttctgagcctgctacttccggctctgaaactccaggtagcgagccagcgacttctggttctgaaactccaggttcaccggcgggtagcccgacgagcacggaggaaggtacctctgagtcggccactcctgagtccggtccgggcacgagcaccgagccgagcgagggttcagccccgggtaccagcacggagccgtccgagggtagcgcaccgggttctccggcgggctcccctacgtctacggaagagggtacgtccactgaacctagcgagggcagcgcgccaggcaccagcactgaaccgagcgaaggcagcgcacctggcactagcgagtctgcgactccggagagcggtccgggtacgagcacggaaccaagcgaaggcagcgccccaggtacctctgaatctgctaccccagaatctggcccgggttccgagccagctacctctggttctgaaaccccaggtacttccactgaaccaagcgaaggtagcgctcctggcacttctactgaaccatccgaaggttccgctcctggtacgtctgaaagcgctacccctgaaagcggcccaggcacctctgaaagcgctactcctgagagcggtccaggctctccagcaggttctccaacctccactgaagaaggcacctctgagtctgctacccctgaatctggtcctggctccgaacctgctacctctggttccgaaactccaggtacctcggaatctgcgactccggaatctggcccgggcacgagcacggagccgtctgagggtagcgcaccaggtaccagcactgagccttctgagggctctgcaccgggtacctccacggaaccttcggaaggttctgcgccgggtacctccactgagccatccgagggttcagcaccaggtactagcacggaaccgtccgagggctctgcaccaggtacgagcaccgaaccgtcggagggtagcgctccaggtagcccagcgggctctccgacaagcaccgaagaaggcaccagcaccgagccgtccgaaggttccgcaccaggtacaagcgagagcgcgactcctgaatctggtccgggtagcgagcctgcaaccagcggttctgagacgccgggcacttccgaatctgcgaccccggagtccggtccaggttcagagccggcgacgagcggttcggaaacgccgggtacgtctgaatcagccacgccggagtctggtccgggtacctcgaccgaaccaagcgaaggttcggcaccgggtactagcgagagcgcaacccctgaaagcggtccgggcagcccggcaggttctccaaccagcaccgaagaaggttcccctgctggtagcccgacctctacggaggaaggtagccctgcaggttccccaacttctactgaggaaggtacttctgagtccgctaccccagaaagcggtcctggtacctccactgaaccgtctgaaggctctgcaccaggcacttctgagtctgctactccagaaagcggcccaggttctgaaccagcaacttctggctctgagactccaggcacttctgagtccgcaacgcctgaatccggtcctggttctgaaccagctacttccggcagcgaaaccccaggtacctctgagtctgcgactccagagtctggtcctggtacttccactgagcctagcgagggttccgcaccaggttctccggctggtagcccgaccagcacggaggagggtacgtctgaatctgcaacgccggaatcgggcccaggttcggagcctgcaacgtctggcagcgaaaccccgggtacctccgaatctgctacaccggaaagcggtcctggcagccctgctggttctccaacctctaccgaggagggttcaccggcaggtagcccgactagcactgaagaaggtactagcacggagccgagcgagggtagtgctccgggtacgagcgagagcgcaacgccagagagcggtccaggcaccagcgaatcggccacccctgagagcggcccaggtacttctgagagcgccactcctgaatccggccctggtagcgagccggcaacctccggctcagaaactcctggttcggaaccagcgaccagcggttctgaaactccgggtagcccggcaggcagcccaacgagcaccgaagagggtaccagcacggaaccgagcgagggttctgccccgggtacttccaccgaaccatcggagggctctgcacctggtagcgaacctgcgacgtctggttctgaaacgccgggtaccagcgaaagcgctaccccagaatccggtccgggcactagcaccgagccatcggagggcgccgcagaaccagaggcg

SEQ ID NO: 822 - DNA, 5229 bp, Artificial Sequence
  Description of Artificial Sequence: Synthetic polynucleotide
caccatcatcaccatcactccccagcaggcagcccgaccagcaccgaggagggtacgagcgagtcggctactccagagagcggtccgggtacctctacggaaccgtccgaaggtagcgctccaggcacgtctgaaagcgcgacgccggaaagcggtccaggcagcgagccggcgacctccggtagcgaaacgcctggtacctcggagtcagcgactccggaaagcggtccgggtagcgaacctgcaacgagcggtagcgagactccaggcactagcgaatccgcaactccggagtcgggtccgggcacctctacggagcctagcgagggctcagcaccaggtagccctgcaggttccccgacgtcaaccgaggaaggtacaagcgaaagcgccacccctgagtcgggccctggcagcgaaccggcaactagcggcagcgagactccgggtaccagcgagtctgctacgccagagagcggcccaggttcgccagcgggttcgccgactagcacggaggagggcagcccagcgggtagcccgaccagcactgaggagggtacgtccaccgaaccgagcgaaggtagcgcaccaggtacctccgagtctgccacccctgaatccggtccaggtaccagcgaatcagccaccccggagtcgggtccaggtacgagcgaatctgctaccccggaatccggcccaggcagcgaacctgctactagcggcagcgaaacgccgggcagcgaacctgccacgtcaggcagcgagacgccgggttcccctgcaggctccccgaccagcactgaggagggcacctccaccgaaccatcagaaggtagcgcgcctggtacgtcaaccgaaccttccgagggcagcgcaccgggtggctcagcgcctgaggcaggtcgttctgctaaccatacccctgcaggattaactggccccgccaccagcgggagcgagacccccgggactgatatccagatgacccaaagccctagttcattaagcgcatcggtgggtgaccgggtaaccattacctgtcaagcaagtcaggatatcagcaactacctgaactggtaccagcagaaacccggaaaagcgccgaaactgctgatctatgatgccagcaatctggaaacaggtgttcctagccgtttctctggatcaggttcaggaaccgattttacattcaccattagctcattacagccggaggataccgcgacgtatttttgccagcacttcgatcatctgcctttagcatttggcggcggtactaaagtggagatcaaaggagcgacgccgcctgagactggagcagagaccgaatcacctggtgagacgacgggcgggtcagccgaaagcgagccaccgggggaagggcaggttcaattgcaagaaagtggaccgggcgccgtcaaacccagccagaccctctccctgacctgcacagtcagcggagggtctgtgagctcaggcgactactattggacctggattagacaacgtccaggtaaaggtcttgagtggattggccacatctactatagcggtaacaccaactataatccgagcctgaaaagtcgtctgaccatcagcatcgacaccagcaaaacccagtttagcctgaaattaagcagcgttacagcagcggatacagcgacctactattgtgtccgtgatcgcgttactggcgcatttgatatttgggggcagggaacaacagttactgtgtcaagtggaggaggtggcagtgaactggttgttacacaagaaccgtccttaacagttagtccggggggcaccgtcacattaacatgtcgttcaagtacaggtgcagtaaccacgtccaactatgcaaattgggttcaacagaagcccggacaggccccgagaggtttaataggtggaacaaacaaaagagcacctggtacacctgcccggttctccggatcctctctcggcggttccgcagcattaaccttaagtggtgttcagccggaagatgaagcggagtattactgcgcactttggtatagcaacttatgggtgtttggaggcggtacaaaattgaccgttctgggtgcgacgccgcccgaaacgggcgcggagacggagtccccaggtgaaaccactggtggaagcgcagaatcagagccaccgggcgagggggaagtacaattacaggagtccggcggaggtctggttcagcctggtggtagcctcaaactgtcctgcgcagcaagcggttttacctttaacacctacgccatgaactgggtgcgtcaagctcctggtaaaggcttagaatgggttgcgcgtattcgtagcaaatacaacaactatgccacctattacgcggacagtgtaaaagaccgtttcaccatcagccgcgatgatagcaaaaatacagcctatctgcagatgaacaacctgaagaccgaagacacggccgtctactactgcgtgcgtcatggcaattttggcaacagctatgttagctggttcgcgtattggggccagggaacactggtcacggtttcctcagggactgctgaggcggctagcgcctccggagaagctggaagaagcgccaatcacacaccagctggacttacaggcccgcctggtagccccgcggggagccctacaagcactgaggagggcacatctgagtccgctacccctgagagtggacccgggacaagcactgagcctagcgaaggaagcgcaccaggttcccccgctgggagccccacaagcacagaagagggaacttctaccgagccctctgagggctcagcccctggaactagcacagagccctccgaaggcagtgcaccgggtacttccgaaagcgcaactccggaatccggccctggttctgagcctgctacttccggctctgaaactccaggtagcgagccagcgacttctggttctgaaactccaggttcaccggcgggtagcccgacgagcacggaggaaggtacctctgagtcggccactcctgagtccggtccgggcacgagcaccgagccgagcgagggttcagccccgggtaccagcacggagccgtccgagggtagcgcaccgggttctccggcgggctcccctacgtctacggaagagggtacgtccactgaacctagcgagggcagcgcgccaggcaccagcactgaaccgagcgaaggcagcgcacctggcactagcgagtctgcgactccggagagcggtccgggtacgagcacggaaccaagcgaaggcagcgccccaggtacctctgaatctgctaccccagaatctggcccgggttccgagccagctacctctggttctgaaaccccaggtacttccactgaaccaagcgaaggtagcgctcctggcacttctactgaaccatccgaaggttccgctcctggtacgtctgaaagcgctacccctgaaagcggcccaggcacctctgaaagcgctactcctgagagcggtccaggctctccagcaggttctccaacctccactgaagaaggcacctctgagtctgctacccctgaatctggtcctggctccgaacctgctacctctggttccgaaactccaggtacctcggaatctgcgactccggaatctggcccgggcacgagcacggagccgtctgagggtagcgcaccaggtaccagcactgagccttctgagggctctgcaccgggtacctccacggaaccttcggaaggttctgcgccgggtacctccactgagccatccgagggttcagcaccaggtactagcacggaaccgtccgagggctctgcaccaggtacgagcaccgaaccgtcggagggtagcgctccaggtagcccagcgggctctccgacaagcaccgaagaaggcaccagcaccgagccgtccgaaggttccgcaccaggtacaagcgagagcgcgactcctgaatctggtccgggtagcgagcctgcaaccagcggttctgagacgccgggcacttccgaatctgcgaccccggagtccggtccaggttcagagccggcgacgagcggttcggaaacgccgggtacgtctgaatcagccacgccggagtctggtccgggtacctcgaccgaaccaagcgaaggttcggcaccgggtactagcgagagcgcaacccctgaaagcggtccgggcagcccggcaggttctccaaccagcaccgaagaaggttcccctgctggtagcccgacctctacggaggaaggtagccctgcaggttccccaacttctactgaggaaggtacttctgagtccgctaccccagaaagcggtcctggtacctccactgaaccgtctgaaggctctgcaccaggcacttctgagtctgctactccagaaagcggcccaggttctgaaccagcaacttctggctctgagactccaggcacttctgagtccgcaacgcctgaatccggtcctggttctgaaccagctacttccggcagcgaaaccccaggtacctctgagtctgcgactccagagtctggtcctggtacttccactgagcctagcgagggttccgcaccaggttctccggctggtagcccgaccagcacggaggagggtacgtctgaatctgcaacgccggaatcgggcccaggttcggagcctgcaacgtctggcagcgaaaccccgggtacctccgaatctgctacaccggaaagcggtcctggcagccctgctggttctccaacctctaccgaggagggttcaccggcaggtagcccgactagcactgaagaaggtactagcacggagccgagcgagggtagtgctccgggtacgagcgagagcgcaacgccagagagcggtccaggcaccagcgaatcggccacccctgagagcggcccaggtacttctgagagcgccactcctgaatccggccctggtagcgagccggcaacctccggctcagaaactcctggttcggaaccagcgaccagcggttctgaaactccgggtagcccggcaggcagcccaacgagcaccgaagagggtaccagcacggaaccgagcgagggttctgccccgggtacttccaccgaaccatcggagggctctgcacctggtagcgaacctgcgacgtctggttctgaaacgccgggtaccagcgaaagcgctaccccagaatccggtccgggcactagcaccgagccatcggagggcgccgcagaaccagaggcg

SEQ ID NO: 823 - DNA, 5229 bp, Artificial Sequence
  Description of Artificial Sequence: Synthetic polynucleotide
caccatcatcaccatcactccccagcaggcagcccgaccagcaccgaggagggtacgagcgagtcggctactccagagagcggtccgggtacctctacggaaccgtccgaaggtagcgctccaggcacgtctgaaagcgcgacgccggaaagcggtccaggcagcgagccggcgacctccggtagcgaaacgcctggtacctcggagtcagcgactccggaaagcggtccgggtagcgaacctgcaacgagcggtagcgagactccaggcactagcgaatccgcaactccggagtcgggtccgggcacctctacggagcctagcgagggctcagcaccaggtagccctgcaggttccccgacgtcaaccgaggaaggtacaagcgaaagcgccacccctgagtcgggccctggcagcgaaccggcaactagcggcagcgagactccgggtaccagcgagtctgctacgccagagagcggcccaggttcgccagcgggttcgccgactagcacggaggagggcagcccagcgggtagcccgaccagcactgaggagggtacgtccaccgaaccgagcgaaggtagcgcaccaggtacctccgagtctgccacccctgaatccggtccaggtaccagcgaatcagccaccccggagtcgggtccaggtacgagcgaatctgctaccccggaatccggcccaggcagcgaacctgctactagcggcagcgaaacgccgggcagcgaacctgccacgtcaggcagcgagacgccgggttcccctgcaggctccccgaccagcactgaggagggcacctccaccgaaccatcagaaggtagcgcgcctggtacgtcaaccgaaccttccgagggcagcgcaccgggtggctcagcgcctgaggcaggtcgttctgctaaccatacccctgcaggattaactggccccgccaccagcgggagcgagacccccgggactgatatccagatgacccaaagccctagttcattaagcgcatcggtgggtgaccgggtaaccattacctgtcaagcaagtcaggatatcagcaactacctgaactggtaccagcagaaacccggaaaagcgccgaaactgctgatctatgatgccagcaatctggaaacaggtgttcctagccgtttctctggatcaggttcaggaaccgattttacattcaccattagccgtttacagccggaggatatcgcgacgtatttttgccagcacttcgatcatctgcctttagcatttggcggcggtactaaagtggagatcaaaggagcgacgccgcctgagactggagcagagaccgaatcacctggtgagacgacgggcgggtcagccgaaagcgagccaccgggggaagggcaggttcaattgcaagaaagtggaccgggcgccgtcaaacccagcgaaaccctctccctgacctgcacagtcagcggagggtctgtgagctcaggcgactactattggacctggattagacaatcaccaggtaaaggtcttgagtggattggccacatctactatagcggtaacaccaactataatccgagcctgaaaagtcgtctgaccatcagcatcgacaccagcaaaacccagtttagcctgaaattaagcagcgttacagcagcggatacagcgacctactattgtgtccgtgatcgcgttactggcgcatttgatatttgggggcagggaacagcagttactgtgtcaagtggaggaggtggcagtgaactggttgttacacaagaaccgtccttaacagttagtccggggggcaccgtcacattaacatgtcgttcaagtacaggtgcagtaaccacgtccaactatgcaaattgggttcaacagaagcccggacaggccccgagaggtttaataggtggaacaaacaaaagagcacctggtacacctgcccggttctccggatcctctctcggcggttccgcagcattaaccttaagtggtgttcagccggaagatgaagcggagtattactgcgcactttggtatagcaacttatgggtgtttggaggcggtacaaaattgaccgttctgggtgcgacgccgcccgaaacgggcgcggagacggagtccccaggtgaaaccactggtggaagcgcagaatcagagccaccgggcgagggggaagtacaattacaggagtccggcggaggtctggttcagcctggtggtagcctcaaactgtcctgcgcagcaagcggttttacctttaacacctacgccatgaactgggtgcgtcaagctcctggtaaaggcttagaatgggttgcgcgtattcgtagcaaatacaacaactatgccacctattacgcggacagtgtaaaagaccgtttcaccatcagccgcgatgatagcaaaaatacagcctatctgcagatgaacaacctgaagaccgaagacacggccgtctactactgcgtgcgtcatggcaattttggcaacagctatgttagctggttcgcgtattggggccagggaacactggtcacggtttcctcagggactgctgaggcggctagcgcctccggagaagctggaagaagcgccaatcacacaccagctggacttacaggcccgcctggtagccccgcggggagccctacaagcactgaggagggcacatctgagtccgctacccctgagagtggacccgggacaagcactgagcctagcgaaggaagcgcaccaggttcccccgctgggagccccacaagcacagaagagggaacttctaccgagccctctgagggctcagcccctggaactagcacagagccctccgaaggcagtgcaccgggtacttccgaaagcgcaactccggaatccggccctggttctgagcctgctacttccggctctgaaactccaggtagcgagccagcgacttctggttctgaaactccaggttcaccggcgggtagcccgacgagcacggaggaaggtacctctgagtcggccactcctgagtccggtccgggcacgagcaccgagccgagcgagggttcagccccgggtaccagcacggagccgtccgagggtagcgcaccgggttctccggcgggctcccctacgtctacggaagagggtacgtccactgaacctagcgagggcagcgcgccaggcaccagcactgaaccgagcgaaggcagcgcacctggcactagcgagtctgcgactccggagagcggtccgggtacgagcacggaaccaagcgaaggcagcgccccaggtacctctgaatctgctaccccagaatctggcccgggttccgagccagctacctctggttctgaaaccccaggtacttccactgaaccaagcgaaggtagcgctcctggcacttctactgaaccatccgaaggttccgctcctggtacgtctgaaagcgctacccctgaaagcggcccaggcacctctgaaagcgctactcctgagagcggtccaggctctccagcaggttctccaacctccactgaagaaggcacctctgagtctgctacccctgaatctggtcctggctccgaacctgctacctctggttccgaaactccaggtacctcggaatctgcgactccggaatctggcccgggcacgagcacggagccgtctgagggtagcgcaccaggtaccagcactgagccttctgagggctctgcaccgggtacctccacggaaccttcggaaggttctgcgccgggtacctccactgagccatccgagggttcagcaccaggtactagcacggaaccgtccgagggctctgcaccaggtacgagcaccgaaccgtcggagggtagcgctccaggtagcccagcgggctctccgacaagcaccgaagaaggcaccagcaccgagccgtccgaaggttccgcaccaggtacaagcgagagcgcgactcctgaatctggtccgggtagcgagcctgcaaccagcggttctgagacgccgggcacttccgaatctgcgaccccggagtccggtccaggttcagagccggcgacgagcggttcggaaacgccgggtacgtctgaatcagccacgccggagtctggtccgggtacctcgaccgaaccaagcgaaggttcggcaccgggtactagcgagagcgcaacccctgaaagcggtccgggcagcccggcaggttctccaaccagcaccgaagaaggttcccctgctggtagcccgacctctacggaggaaggtagccctgcaggttccccaacttctactgaggaaggtacttctgagtccgctaccccagaaagcggtcctggtacctccactgaaccgtctgaaggctctgcaccaggcacttctgagtctgctactccagaaagcggcccaggttctgaaccagcaacttctggctctgagactccaggcacttctgagtccgcaacgcctgaatccggtcctggttctgaaccagctacttccggcagcgaaaccccaggtacctctgagtctgcgactccagagtctggtcctggtacttccactgagcctagcgagggttccgcaccaggttctccggctggtagcccgaccagcacggaggagggtacgtctgaatctgcaacgccggaatcgggcccaggttcggagcctgcaacgtctggcagcgaaaccccgggtacctccgaatctgctacaccggaaagcggtcctggcagccctgctggttctccaacctctaccgaggagggttcaccggcaggtagcccgactagcactgaagaaggtactagcacggagccgagcgagggtagtgctccgggtacgagcgagagcgcaacgccagagagcggtccaggcaccagcgaatcggccacccctgagagcggcccaggtacttctgagagcgccactcctgaatccggccctggtagcgagccggcaacctccggctcagaaactcctggttcggaaccagcgaccagcggttctgaaactccgggtagcccggcaggcagcccaacgagcaccgaagagggtaccagcacggaaccgagcgagggttctgccccgggtacttccaccgaaccatcggagggctctgcacctggtagcgaacctgcgacgtctggttctgaaacgccgggtaccagcgaaagcgctaccccagaatccggtccgggcactagcaccgagccatcggagggcgccgcagaaccagaggcg

SEQ ID NO: 824 - DNA, 5229 bp, Artificial Sequence
  Description of Artificial Sequence: Synthetic polynucleotide
caccatcatcaccatcactccccagcaggcagcccgaccagcaccgaggagggtacgagcgagtcggctactccagagagcggtccgggtacctctacggaaccgtccgaaggtagcgctccaggcacgtctgaaagcgcgacgccggaaagcggtccaggcagcgagccggcgacctccggtagcgaaacgcctggtacctcggagtcagcgactccggaaagcggtccgggtagcgaacctgcaacgagcggtagcgagactccaggcactagcgaatccgcaactccggagtcgggtccgggcacctctacggagcctagcgagggctcagcaccaggtagccctgcaggttccccgacgtcaaccgaggaaggtacaagcgaaagcgccacccctgagtcgggccctggcagcgaaccggcaactagcggcagcgagactccgggtaccagcgagtctgctacgccagagagcggcccaggttcgccagcgggttcgccgactagcacggaggagggcagcccagcgggtagcccgaccagcactgaggagggtacgtccaccgaaccgagcgaaggtagcgcaccaggtacctccgagtctgccacccctgaatccggtccaggtaccagcgaatcagccaccccggagtcgggtccaggtacgagcgaatctgctaccccggaatccggcccaggcagcgaacctgctactagcggcagcgaaacgccgggcagcgaacctgccacgtcaggcagcgagacgccgggttcccctgcaggctccccgaccagcactgaggagggcacctccaccgaaccatcagaaggtagcgcgcctggtacgtcaaccgaaccttccgagggcagcgcaccgggtggctcagcgcctgaggcaggtcgttctgctaaccatacccctgcaggattaactggccccgccaccagcgggagcgagacccccgggactgatatccagatgacccaaagccctagttcattaagcgcatcggtgggtgaccgggtaaccattacctgtcaagcaagtcaggatatcagcaactacctgaactggtaccagcagaaacccggaaaagcgccgaaactgctgatctatgatgccagcaatctggaaacaggtgttcctagccgtttctctggatcaggttcaggaaccgattttacattcaccattagccgtttacagccggaggatatcgcgacgtatttttgccagcacttcgatcatctgcctttagcatttggcggcggtactaaagtggagatcaaaggagcgacgccgcctgagactggagcagagaccgaatcacctggtgagacgacgggcgggtcagccgaaagcgagccaccgggggaagggcaggttcaattgcaagaaagtggaccgggcgccgtcaaacccagcgaaaccctctccctgacctgcacagtcagcggagggtctgtgagctcaggcgactactattggacctggattagacaatcaccaggtaaaggtcttgagtggattggccacatctactatagcggtaacaccaactataatccgagcctgaaaagtcgtctgaccatcagcatcgacaccagcaaaacccagtttagcctgaaattaagcagcgttacagcagcggatacagcgacctactattgtgtccgtgatcgcgttactggcgcatttgatatttgggggcagggaacaacagttactgtgtcaagtggaggaggtggcagtgaactggttgttacacaagaaccgtccttaacagttagtccggggggcaccgtcacattaacatgtcgttcaagtacaggtgcagtaaccacgtccaactatgcaaattgggttcaacagaagcccggacaggccccgagaggtttaataggtggaacaaacaaaagagcacctggtacacctgcccggttctccggatcctctctcggcggttccgcagcattaaccttaagtggtgttcagccggaagatgaagcggagtattactgcgcactttggtatagcaacttatgggtgtttggaggcggtacaaaattgaccgttctgggtgcgacgccgcccgaaacgggcgcggagacggagtccccaggtgaaaccactggtggaagcgcagaatcagagccaccgggcgagggggaagtacaattacaggagtccggcggaggtctggttcagcctggtggtagcctcaaactgtcctgcgcagcaagcggttttacctttaacacctacgccatgaactgggtgcgtcaagctcctggtaaaggcttagaatgggttgcgcgtattcgtagcaaatacaacaactatgccacctattacgcggacagtgtaaaagaccgtttcaccatcagccgcgatgatagcaaaaatacagcctatctgcagatgaacaacctgaagaccgaagacacggccgtctactactgcgtgcgtcatggcaattttggcaacagctatgttagctggttcgcgtattggggccagggaacactggtcacggtttcctcagggactgctgaggcggctagcgcctccggagaagctggaagaagcgccaatcacacaccagctggacttacaggcccgcctggtagccccgcggggagccctacaagcactgaggagggcacatctgagtccgctacccctgagagtggacccgggacaagcactgagcctagcgaaggaagcgcaccaggttcccccgctgggagccccacaagcacagaagagggaacttctaccgagccctctgagggctcagcccctggaactagcacagagccctccgaaggcagtgcaccgggtacttccgaaagcgcaactccggaatccggccctggttctgagcctgctacttccggctctgaaactccaggtagcgagccagcgacttctggttctgaaactccaggttcaccggcgggtagcccgacgagcacggaggaaggtacctctgagtcggccactcctgagtccggtccgggcacgagcaccgagccgagcgagggttcagccccgggtaccagcacggagccgtccgagggtagcgcaccgggttctccggcgggctcccctacgtctacggaagagggtacgtccactgaacctagcgagggcagcgcgccaggcaccagcactgaaccgagcgaaggcagcgcacctggcactagcgagtctgcgactccggagagcggtccgggtacgagcacggaaccaagcgaaggcagcgccccaggtacctctgaatctgctaccccagaatctggcccgggttccgagccagctacctctggttctgaaaccccaggtacttccactgaaccaagcgaaggtagcgctcctggcacttctactgaaccatccgaaggttccgctcctggtacgtctgaaagcgctacccctgaaagcggcccaggcacctctgaaagcgctactcctgagagcggtccaggctctccagcaggttctccaacctccactgaagaaggcacctctgagtctgctacccctgaatctggtcctggctccgaacctgctacctctggttccgaaactccaggtacctcggaatctgcgactccggaatctggcccgggcacgagcacggagccgtctgagggtagcgcaccaggtaccagcactgagccttctgagggctctgcaccgggtacctccacggaaccttcggaaggttctgcgccgggtacctccactgagccatccgagggttcagcaccaggtactagcacggaaccgtccgagggctctgcaccaggtacgagcaccgaaccgtcggagggtagcgctccaggtagcccagcgggctctccgacaagcaccgaagaaggcaccagcaccgagccgtccgaaggttccgcaccaggtacaagcgagagcgcgactcctgaatctggtccgggtagcgagcctgcaaccagcggttctgagacgccgggcacttccgaatctgcgaccccggagtccggtccaggttcagagccggcgacgagcggttcggaaacgccgggtacgtctgaatcagccacgccggagtctggtccgggtacctcgaccgaaccaagcgaaggttcggcaccgggtactagcgagagcgcaacccctgaaagcggtccgggcagcccggcaggttctccaaccagcaccgaagaaggttcccctgctggtagcccgacctctacggaggaaggtagccctgcaggttccccaacttctactgaggaaggtacttctgagtccgctaccccagaaagcggtcctggtacctccactgaaccgtctgaaggctctgcaccaggcacttctgagtctgctactccagaaagcggcccaggttctgaaccagcaacttctggctctgagactccaggcacttctgagtccgcaacgcctgaatccggtcctggttctgaaccagctacttccggcagcgaaaccccaggtacctctgagtctgcgactccagagtctggtcctggtacttccactgagcctagcgagggttccgcaccaggttctccggctggtagcccgaccagcacggaggagggtacgtctgaatctgcaacgccggaatcgggcccaggttcggagcctgcaacgtctggcagcgaaaccccgggtacctccgaatctgctacaccggaaagcggtcctggcagccctgctggttctccaacctctaccgaggagggttcaccggcaggtagcccgactagcactgaagaaggtactagcacggagccgagcgagggtagtgctccgggtacgagcgagagcgcaacgccagagagcggtccaggcaccagcgaatcggccacccctgagagcggcccaggtacttctgagagcgccactcctgaatccggccctggtagcgagccggcaacctccggctcagaaactcctggttcggaaccagcgaccagcggttctgaaactccgggtagcccggcaggcagcccaacgagcaccgaagagggtaccagcacggaaccgagcgagggttctgccccgggtacttccaccgaaccatcggagggctctgcacctggtagcgaacctgcgacgtctggttctgaaacgccgggtaccagcgaaagcgctaccccagaatccggtccgggcactagcaccgagccatcggagggcgccgcagaaccagaggcg

SEQ ID NO: 825 - DNA, 5229 bp, Artificial Sequence
  Description of Artificial Sequence: Synthetic polynucleotide
caccatcatcaccatcactccccagcaggcagcccgaccagcaccgaggagggtacgagcgagtcggctactccagagagcggtccgggtacctctacggaaccgtccgaaggtagcgctccaggcacgtctgaaagcgcgacgccggaaagcggtccaggcagcgagccggcgacctccggtagcgaaacgcctggtacctcggagtcagcgactccggaaagcggtccgggtagcgaacctgcaacgagcggtagcgagactccaggcactagcgaatccgcaactccggagtcgggtccgggcacctctacggagcctagcgagggctcagcaccaggtagccctgcaggttccccgacgtcaaccgaggaaggtacaagcgaaagcgccacccctgagtcgggccctggcagcgaaccggcaactagcggcagcgagactccgggtaccagcgagtctgctacgccagagagcggcccaggttcgccagcgggttcgccgactagcacggaggagggcagcccagcgggtagcccgaccagcactgaggagggtacgtccaccgaaccgagcgaaggtagcgcaccaggtacctccgagtctgccacccctgaatccggtccaggtaccagcgaatcagccaccccggagtcgggtccaggtacgagcgaatctgctaccccggaatccggcccaggcagcgaacctgctactagcggcagcgaaacgccgggcagcgaacctgccacgtcaggcagcgagacgccgggttcccctgcaggctccccgaccagcactgaggagggcacctccaccgaaccatcagaaggtagcgcgcctggtacgtcaaccgaaccttccgagggcagcgcaccgggtggctcagcgcctgaggcaggtcgttctgctaaccatacccctgcaggattaactggccccgccaccagcgggagcgagacccccgggactgatatccagatgacccaaagccctagttcattaagcgcatcggtgggtgaccgggtaaccattacctgtcaagcaagtcaggatatcagcaactacctgaactggtaccagcagaaacccggaaaagcgccgaaactgctgatctatgatgccagcaatctggaaacaggtgttcctagccgtttctctggatcaggttcaggaaccgattttacattcaccattagccgtttacagccggaggatatcgcgacgtatttttgccagcacttcgatcatctgcctttagcatttggcggcggtactaaagtggagatcaaaggagcgacgccgcctgagactggagcagagaccgaatcacctggtgagacgacgggcgggtcagccgaaagcgagccaccgggggaagggcaggttcaattgcaagaaagtggaccgggcttagtcaaacccagccagaccctctccctgacctgcacagtcagcggagggtctgtgagctcaggcgactactattggacctggattagacaacgtccaggtaaaggtcttgagtggattggccacatctactatagcggtaacaccaactataatccgagcctgaaaagtcgtctgaccatcagcatcgacaccagcaaaacccagtttagcctgaaattaagcagcgttacagcagcggatacagcgatttactattgtgtccgtgatcgcgttactggcgcatttgatatttgggggcagggaacaatggttactgtgtcaagtggaggaggtggcagtgaactggttgttacacaagaaccgtccttaacagttagtccggggggcaccgtcacattaacatgtcgttcaagtacaggtgcagtaaccacgtccaactatgcaaattgggttcaacagaagcccggacaggccccgagaggtttaataggtggaacaaacaaaagagcacctggtacacctgcccggttctccggatcctctctcggcggttccgcagcattaaccttaagtggtgttcagccggaagatgaagcggagtattactgcgcactttggtatagcaacttatgggtgtttggaggcggtacaaaattgaccgttctgggtgcgacgccgcccgaaacgggcgcggagacggagtccccaggtgaaaccactggtggaagcgcagaatcagagccaccgggcgagggggaagtacaattacaggagtccggcggaggtctggttcagcctggtggtagcctcaaactgtcctgcgcagcaagcggttttacctttaacacctacgccatgaactgggtgcgtcaagctcctggtaaaggcttagaatgggttgcgcgtattcgtagcaaatacaacaactatgccacctattacgcggacagtgtaaaagaccgtttcaccatcagccgcgatgatagcaaaaatacagcctatctgcagatgaacaacctgaagaccgaagacacggccgtctactactgcgtgcgtcatggcaattttggcaacagctatgttagctggttcgcgtattggggccagggaacactggtcacggtttcctcagggactgctgaggcggctagcgcctccggagaagctggaagaagcgccaatcacacaccagctggacttacaggcccgcctggtagccccgcggggagccctacaagcactgaggagggcacatctgagtccgctacccctgagagtggacccgggacaagcactgagcctagcgaaggaagcgcaccaggttcccccgctgggagccccacaagcacagaagagggaacttctaccgagccctctgagggctcagcccctggaactagcacagagccctccgaaggcagtgcaccgggtacttccgaaagcgcaactccggaatccggccctggttctgagcctgctacttccggctctgaaactccaggtagcgagccagcgacttctggttctgaaactccaggttcaccggcgggtagcccgacgagcacggaggaaggtacctctgagtcggccactcctgagtccggtccgggcacgagcaccgagccgagcgagggttcagccccgggtaccagcacggagccgtccgagggtagcgcaccgggttctccggcgggctcccctacgtctacggaagagggtacgtccactgaacctagcgagggcagcgcgccaggcaccagcactgaaccgagcgaaggcagcgcacctggcactagcgagtctgcgactccggagagcggtccgggtacgagcacggaaccaagcgaaggcagcgccccaggtacctctgaatctgctaccccagaatctggcccgggttccgagccagctacctctggttctgaaaccccaggtacttccactgaaccaagcgaaggtagcgctcctggcacttctactgaaccatccgaaggttccgctcctggtacgtctgaaagcgctacccctgaaagcggcccaggcacctctgaaagcgctactcctgagagcggtccaggctctccagcaggttctccaacctccactgaagaaggcacctctgagtctgctacccctgaatctggtcctggctccgaacctgctacctctggttccgaaactccaggtacctcggaatctgcgactccggaatctggcccgggcacgagcacggagccgtctgagggtagcgcaccaggtaccagcactgagccttctgagggctctgcaccgggtacctccacggaaccttcggaaggttctgcgccgggtacctccactgagccatccgagggttcagcaccaggtactagcacggaaccgtccgagggctctgcaccaggtacgagcaccgaaccgtcggagggtagcgctccaggtagcccagcgggctctccgacaagcaccgaagaaggcaccagcaccgagccgtccgaaggttccgcaccaggtacaagcgagagcgcgactcctgaatctggtccgggtagcgagcctgcaaccagcggttctgagacgccgggcacttccgaatctgcgaccccggagtccggtccaggttcagagccggcgacgagcggttcggaaacgccgggtacgtctgaatcagccacgccggagtctggtccgggtacctcgaccgaaccaagcgaaggttcggcaccgggtactagcgagagcgcaacccctgaaagcggtccgggcagcccggcaggttctccaaccagcaccgaagaaggttcccctgctggtagcccgacctctacggaggaaggtagccctgcaggttccccaacttctactgaggaaggtacttctgagtccgctaccccagaaagcggtcctggtacctccactgaaccgtctgaaggctctgcaccaggcacttctgagtctgctactccagaaagcggcccaggttctgaaccagcaacttctggctctgagactccaggcacttctgagtccgcaacgcctgaatccggtcctggttctgaaccagctacttccggcagcgaaaccccaggtacctctgagtctgcgactccagagtctggtcctggtacttccactgagcctagcgagggttccgcaccaggttctccggctggtagcccgaccagcacggaggagggtacgtctgaatctgcaacgccggaatcgggcccaggttcggagcctgcaacgtctggcagcgaaaccccgggtacctccgaatctgctacaccggaaagcggtcctggcagccctgctggttctccaacctctaccgaggagggttcaccggcaggtagcccgactagcactgaagaaggtactagcacggagccgagcgagggtagtgctccgggtacgagcgagagcgcaacgccagagagcggtccaggcaccagcgaatcggccacccctgagagcggcccaggtacttctgagagcgccactcctgaatccggccctggtagcgagccggcaacctccggctcagaaactcctggttcggaaccagcgaccagcggttctgaaactccgggtagcccggcaggcagcccaacgagcaccgaagagggtaccagcacggaaccgagcgagggttctgccccgggtacttccaccgaaccatcggagggctctgcacctggtagcgaacctgcgacgtctggttctgaaacgccgggtaccagcgaaagcgctaccccagaatccggtccgggcactagcaccgagccatcggagggcgccgcagaaccagaggcg

SEQ ID NO: 826 - DNA, 5229 bp, Artificial Sequence
  Description of Artificial Sequence: Synthetic polynucleotide
caccatcatcaccatcactccccagcaggcagcccgaccagcaccgaggagggtacgagcgagtcggctactccagagagcggtccgggtacctctacggaaccgtccgaaggtagcgctccaggcacgtctgaaagcgcgacgccggaaagcggtccaggcagcgagccggcgacctccggtagcgaaacgcctggtacctcggagtcagcgactccggaaagcggtccgggtagcgaacctgcaacgagcggtagcgagactccaggcactagcgaatccgcaactccggagtcgggtccgggcacctctacggagcctagcgagggctcagcaccaggtagccctgcaggttccccgacgtcaaccgaggaaggtacaagcgaaagcgccacccctgagtcgggccctggcagcgaaccggcaactagcggcagcgagactccgggtaccagcgagtctgctacgccagagagcggcccaggttcgccagcgggttcgccgactagcacggaggagggcagcccagcgggtagcccgaccagcactgaggagggtacgtccaccgaaccgagcgaaggtagcgcaccaggtacctccgagtctgccacccctgaatccggtccaggtaccagcgaatcagccaccccggagtcgggtccaggtacgagcgaatctgctaccccggaatccggcccaggcagcgaacctgctactagcggcagcgaaacgccgggcagcgaacctgccacgtcaggcagcgagacgccgggttcccctgcaggctccccgaccagcactgaggagggcacctccaccgaaccatcagaaggtagcgcgcctggtacgtcaaccgaaccttccgagggcagcgcaccgggtggctcagcgcctgaggcaggtcgttctgctaaccatacccctgcaggattaactggccccgccaccagcgggagcgagacccccgggactgatatccagatgacccaaagccctagttcattaagcgcatcggtgggtgaccgggtaaccattacctgtcaagcaagtcaggatatcagcaactacctgaactggtaccagcagaaacccggaaaagcgccgaaactgctgatctatgatgccagcaatctggaaacaggtgttcctagccgtttctctggatcaggttcaggaaccgattttacattcaccattagccgtttacagccggaggatatcgcgacgtatttttgccagcacttcgatcatctgcctttagcatttggcggcggtactaaagtggagatcaaaggagcgacgccgcctgagactggagcagagaccgaatcacctggtgagacgacgggcgggtcagccgaaagcgagccaccgggggaagggcaggttcaattgcaagaaagtggaccgggcgccgtcaaacccagccagaccctctccctgacctgcacagtcagcggagggtctgtgagctcaggcgactactattggacctggattagacaacgtccaggtaaaggtcttgagtggattggccacatctactatagcggtaacaccaactataatccgagcctgaaaagtcgtctgaccatcagcatcgacaccagcaaaacccagtttagcctgaaattaagcagcgttacagcagcggatacagcgacctactattgtgtccgtgatcgcgttactggcgcatttgatatttgggggcagggaacagcagttactgtgtcaagtggaggaggtggcagtgaactggttgttacacaagaaccgtccttaacagttagtccggggggcaccgtcacattaacatgtcgttcaagtacaggtgcagtaaccacgtccaactatgcaaattgggttcaacagaagcccggacaggccccgagaggtttaataggtggaacaaacaaaagagcacctggtacacctgcccggttctccggatcctctctcggcggttccgcagcattaaccttaagtggtgttcagccggaagatgaagcggagtattactgcgcactttggtatagcaacttatgggtgtttggaggcggtacaaaattgaccgttctgggtgcgacgccgcccgaaacgggcgcggagacggagtccccaggtgaaaccactggtggaagcgcagaatcagagccaccgggcgagggggaagtacaattacaggagtccggcggaggtctggttcagcctggtggtagcctcaaactgtcctgcgcagcaagcggttttacctttaacacctacgccatgaactgggtgcgtcaagctcctggtaaaggcttagaatgggttgcgcgtattcgtagcaaatacaacaactatgccacctattacgcggacagtgtaaaagaccgtttcaccatcagccgcgatgatagcaaaaatacagcctatctgcagatgaacaacctgaagaccgaagacacggccgtctactactgcgtgcgtcatggcaattttggcaacagctatgttagctggttcgcgtattggggccagggaacactggtcacggtttcctcagggactgctgaggcggctagcgcctccggagaagctggaagaagcgccaatcacacaccagctggacttacaggcccgcctggtagccccgcggggagccctacaagcactgaggagggcacatctgagtccgctacccctgagagtggacccgggacaagcactgagcctagcgaaggaagcgcaccaggttcccccgctgggagccccacaagcacagaagagggaacttctaccgagccctctgagggctcagcccctggaactagcacagagccctccgaaggcagtgcaccgggtacttccgaaagcgcaactccggaatccggccctggttctgagcctgctacttccggctctgaaactccaggtagcgagccagcgacttctggttctgaaactccaggttcaccggcgggtagcccgacgagcacggaggaaggtacctctgagtcggccactcctgagtccggtccgggcacgagcaccgagccgagcgagggttcagccccgggtaccagcacggagccgtccgagggtagcgcaccgggttctccggcgggctcccctacgtctacggaagagggtacgtccactgaacctagcgagggcagcgcgccaggcaccagcactgaaccgagcgaaggcagcgcacctggcactagcgagtctgcgactccggagagcggtccgggtacgagcacggaaccaagcgaaggcagcgccccaggtacctctgaatctgctaccccagaatctggcccgggttccgagccagctacctctggttctgaaaccccaggtacttccactgaaccaagcgaaggtagcgctcctggcacttctactgaaccatccgaaggttccgctcctggtacgtctgaaagcgctacccctgaaagcggcccaggcacctctgaaagcgctactcctgagagcggtccaggctctccagcaggttctccaacctccactgaagaaggcacctctgagtctgctacccctgaatctggtcctggctccgaacctgctacctctggttccgaaactccaggtacctcggaatctgcgactccggaatctggcccgggcacgagcacggagccgtctgagggtagcgcaccaggtaccagcactgagccttctgagggctctgcaccgggtacctccacggaaccttcggaaggttctgcgccgggtacctccactgagccatccgagggttcagcaccaggtactagcacggaaccgtccgagggctctgcaccaggtacgagcaccgaaccgtcggagggtagcgctccaggtagcccagcgggctctccgacaagcaccgaagaaggcaccagcaccgagccgtccgaaggttccgcaccaggtacaagcgagagcgcgactcctgaatctggtccgggtagcgagcctgcaaccagcggttctgagacgccgggcacttccgaatctgcgaccccggagtccggtccaggttcagagccggcgacgagcggttcggaaacgccgggtacgtctgaatcagccacgccggagtctggtccgggtacctcgaccgaaccaagcgaaggttcggcaccgggtactagcgagagcgcaacccctgaaagcggtccgggcagcccggcaggttctccaaccagcaccgaagaaggttcccctgctggtagcccgacctctacggaggaaggtagccctgcaggttccccaacttctactgaggaaggtacttctgagtccgctaccccagaaagcggtcctggtacctccactgaaccgtctgaaggctctgcaccaggcacttctgagtctgctactccagaaagcggcccaggttctgaaccagcaacttctggctctgagactccaggcacttctgagtccgcaacgcctgaatccggtcctggttctgaaccagctacttccggcagcgaaaccccaggtacctctgagtctgcgactccagagtctggtcctggtacttccactgagcctagcgagggttccgcaccaggttctccggctggtagcccgaccagcacggaggagggtacgtctgaatctgcaacgccggaatcgggcccaggttcggagcctgcaacgtctggcagcgaaaccccgggtacctccgaatctgctacaccggaaagcggtcctggcagccctgctggttctccaacctctaccgaggagggttcaccggcaggtagcccgactagcactgaagaaggtactagcacggagccgagcgagggtagtgctccgggtacgagcgagagcgcaacgccagagagcggtccaggcaccagcgaatcggccacccctgagagcggcccaggtacttctgagagcgccactcctgaatccggccctggtagcgagccggcaacctccggctcagaaactcctggttcggaaccagcgaccagcggttctgaaactccgggtagcccggcaggcagcccaacgagcaccgaagagggtaccagcacggaaccgagcgagggttctgccccgggtacttccaccgaaccatcggagggctctgcacctggtagcgaacctgcgacgtctggttctgaaacgccgggtaccagcgaaagcgctaccccagaatccggtccgggcactagcaccgagccatcggagggcgccgcagaaccagaggcg

SEQ ID NO: 827 - DNA, 5229 bp, Artificial Sequence
  Description of Artificial Sequence: Synthetic polynucleotide
caccatcatcaccatcactccccagcaggcagcccgaccagcaccgaggagggtacgagcgagtcggctactccagagagcggtccgggtacctctacggaaccgtccgaaggtagcgctccaggcacgtctgaaagcgcgacgccggaaagcggtccaggcagcgagccggcgacctccggtagcgaaacgcctggtacctcggagtcagcgactccggaaagcggtccgggtagcgaacctgcaacgagcggtagcgagactccaggcactagcgaatccgcaactccggagtcgggtccgggcacctctacggagcctagcgagggctcagcaccaggtagccctgcaggttccccgacgtcaaccgaggaaggtacaagcgaaagcgccacccctgagtcgggccctggcagcgaaccggcaactagcggcagcgagactccgggtaccagcgagtctgctacgccagagagcggcccaggttcgccagcgggttcgccgactagcacggaggagggcagcccagcgggtagcccgaccagcactgaggagggtacgtccaccgaaccgagcgaaggtagcgcaccaggtacctccgagtctgccacccctgaatccggtccaggtaccagcgaatcagccaccccggagtcgggtccaggtacgagcgaatctgctaccccggaatccggcccaggcagcgaacctgctactagcggcagcgaaacgccgggcagcgaacctgccacgtcaggcagcgagacgccgggttcccctgcaggctccccgaccagcactgaggagggcacctccaccgaaccatcagaaggtagcgcgcctggtacgtcaaccgaaccttccgagggcagcgcaccgggtggctcagcgcctgaggcaggtcgttctgctaaccatacccctgcaggattaactggccccgccaccagcgggagcgagacccccgggactgacatccaaatgacccagagcccgagcagcctgagcgcgagcgtgggcgaccgtgttaccatcacctgccaagcgagccaagacatcagcaactacctgaactggtatcagcaaaagccgggcaaagcgccgaagctgctgatctacgacgcgagcaacctggaaaccggtgtgccgagccgtttcagcggtagcggtagcggtaccgatttcacctttaccatcagccgtctgcaaccggaggacatcgcgacctatttctgccagcactttgatcacctgccgctggcgtttggtggcggtaccaaagttgagattaaaggtgcaacgcctccggagactggtgctgaaactgagtccccgggcgagacgaccggtggctctgctgaatccgaaccaccgggcgaaggccaggtgcaactgcaggaaagcggtccgggcgccgttaaaccgagccagaccctgagcctgacctgcaccgtgagcggcggtagcgttagcagcggtgactactattggacctggatccgtcaacgtccgggtaaaggcctggagtggatcggtcacatttactatagcggcaacaccaactacaacccgagcctgaagagccgtctgaccatcagcattgacaccagcaaaacccagttcagcctgaaactgagcagcgtgaccgcggcggataccgcgacctactattgcgttcgtgatcgtgttaccggcgcgttcgacatctggggtcagggcaccacagttaccgttagcagcggtggtggcggcagcgagttagttgtgacccaagagccgagcctgaccgttagcccgggtggtacggtcaccctgacgtgccgtagcagcaccggtgcggtcacgaccagcaactatgccaattgggtccagcagaaaccgggtcaagcaccgcgtggcctgatcggcggcaccaataaacgtgccccgggtactcctgcgcgtttctccggtagcagtctgggcggcagtgccgctctgaccctgagcggtgtccagccggaagatgaagcggagtactactgcgcgctgtggtattccaatctgtgggtttttggcggcggtaccaagctgaccgtattgggtgctacgccaccggagactggcgcagaaacggaaagcccgggtgagactacgggtggctctgcggagagcgaacctccgggtgagggtgaggtccaactgcaggagtctggtggtggcctggttcaaccgggtggctcgttgaagctgagctgtgcagctagcggctttaccttcaacacctatgcgatgaattgggttcgtcaggcaccgggtaagggcctggaatgggtggcgcgtatccgctccaagtacaacaactacgcgacctactacgcggatagcgttaaagaccgcttcacgattagccgtgacgattccaagaatacggcatatctgcaaatgaacaatctgaaaaccgaagataccgcggtgtattactgtgtgcgccacggcaatttcggcaacagctacgtgagctggtttgcatattggggtcagggcaccctggttacggtgagctccgggactgctgaggcggctagcgcctccggagaagctggaagaagcgccaatcacacaccagctggacttacaggcccgcctggtagccccgcggggagccctacaagcactgaggagggcacatctgagtccgctacccctgagagtggacccgggacaagcactgagcctagcgaaggaagcgcaccaggttcccccgctgggagccccacaagcacagaagagggaacttctaccgagccctctgagggctcagcccctggaactagcacagagccctccgaaggcagtgcaccgggtacttccgaaagcgcaactccggaatccggccctggttctgagcctgctacttccggctctgaaactccaggtagcgagccagcgacttctggttctgaaactccaggttcaccggcgggtagcccgacgagcacggaggaaggtacctctgagtcggccactcctgagtccggtccgggcacgagcaccgagccgagcgagggttcagccccgggtaccagcacggagccgtccgagggtagcgcaccgggttctccggcgggctcccctacgtctacggaagagggtacgtccactgaacctagcgagggcagcgcgccaggcaccagcactgaaccgagcgaaggcagcgcacctggcactagcgagtctgcgactccggagagcggtccgggtacgagcacggaaccaagcgaaggcagcgccccaggtacctctgaatctgctaccccagaatctggcccgggttccgagccagctacctctggttctgaaaccccaggtacttccactgaaccaagcgaaggtagcgctcctggcacttctactgaaccatccgaaggttccgctcctggtacgtctgaaagcgctacccctgaaagcggcccaggcacctctgaaagcgctactcctgagagcggtccaggctctccagcaggttctccaacctccactgaagaaggcacctctgagtctgctacccctgaatctggtcctggctccgaacctgctacctctggttccgaaactccaggtacctcggaatctgcgactccggaatctggcccgggcacgagcacggagccgtctgagggtagcgcaccaggtaccagcactgagccttctgagggctctgcaccgggtacctccacggaaccttcggaaggttctgcgccgggtacctccactgagccatccgagggttcagcaccaggtactagcacggaaccgtccgagggctctgcaccaggtacgagcaccgaaccgtcggagggtagcgctccaggtagcccagcgggctctccgacaagcaccgaagaaggcaccagcaccgagccgtccgaaggttccgcaccaggtacaagcgagagcgcgactcctgaatctggtccgggtagcgagcctgcaaccagcggttctgagacgccgggcacttccgaatctgcgaccccggagtccggtccaggttcagagccggcgacgagcggttcggaaacgccgggtacgtctgaatcagccacgccggagtctggtccgggtacctcgaccgaaccaagcgaaggttcggcaccgggtactagcgagagcgcaacccctgaaagcggtccgggcagcccggcaggttctccaaccagcaccgaagaaggttcccctgctggtagcccgacctctacggaggaaggtagccctgcaggttccccaacttctactgaggaaggtacttctgagtccgctaccccagaaagcggtcctggtacctccactgaaccgtctgaaggctctgcaccaggcacttctgagtctgctactccagaaagcggcccaggttctgaaccagcaacttctggctctgagactccaggcacttctgagtccgcaacgcctgaatccggtcctggttctgaaccagctacttccggcagcgaaaccccaggtacctctgagtctgcgactccagagtctggtcctggtacttccactgagcctagcgagggttccgcaccaggttctccggctggtagcccgaccagcacggaggagggtacgtctgaatctgcaacgccggaatcgggcccaggttcggagcctgcaacgtctggcagcgaaaccccgggtacctccgaatctgctacaccggaaagcggtcctggcagccctgctggttctccaacctctaccgaggagggttcaccggcaggtagcccgactagcactgaagaaggtactagcacggagccgagcgagggtagtgctccgggtacgagcgagagcgcaacgccagagagcggtccaggcaccagcgaatcggccacccctgagagcggcccaggtacttctgagagcgccactcctgaatccggccctggtagcgagccggcaacctccggctcagaaactcctggttcggaaccagcgaccagcggttctgaaactccgggtagcccggcaggcagcccaacgagcaccgaagagggtaccagcacggaaccgagcgagggttctgccccgggtacttccaccgaaccatcggagggctctgcacctggtagcgaacctgcgacgtctggttctgaaacgccgggtaccagcgaaagcgctaccccagaatccggtccgggcactagcaccgagccatcggagggcgccgcagaaccagaggcg

SEQ ID NO: 828 - DNA, 5229 bp, Artificial Sequence
  Description of Artificial Sequence: Synthetic polynucleotide
caccatcatcaccatcactccccagcaggcagcccgaccagcaccgaggagggtacgagcgagtcggctactccagagagcggtccgggtacctctacggaaccgtccgaaggtagcgctccaggcacgtctgaaagcgcgacgccggaaagcggtccaggcagcgagccggcgacctccggtagcgaaacgcctggtacctcggagtcagcgactccggaaagcggtccgggtagcgaacctgcaacgagcggtagcgagactccaggcactagcgaatccgcaactccggagtcgggtccgggcacctctacggagcctagcgagggctcagcaccaggtagccctgcaggttccccgacgtcaaccgaggaaggtacaagcgaaagcgccacccctgagtcgggccctggcagcgaaccggcaactagcggcagcgagactccgggtaccagcgagtctgctacgccagagagcggcccaggttcgccagcgggttcgccgactagcacggaggagggcagcccagcgggtagcccgaccagcactgaggagggtacgtccaccgaaccgagcgaaggtagcgcaccaggtacctccgagtctgccacccctgaatccggtccaggtaccagcgaatcagccaccccggagtcgggtccaggtacgagcgaatctgctaccccggaatccggcccaggcagcgaacctgctactagcggcagcgaaacgccgggcagcgaacctgccacgtcaggcagcgagacgccgggttcccctgcaggctccccgaccagcactgaggagggcacctccaccgaaccatcagaaggtagcgcgcctggtacgtcaaccgaaccttccgagggcagcgcaccgggtggctcagcgcctgaggcaggtcgttctgctaaccatacccctgcaggattaactggccccgccaccagcgggagcgagacccccgggactgatatccagatgacccaaagccctagttcattaagcgcatcggtgggtgaccgggtaaccattacctgtcaagcaagtcaggatatcagcaactacctgaactggtaccagcagaaacccggaaaagcgccgaaactgctgatctatgatgccagcaatctggaaacaggtgttcctagccgtttctctggatcaggttcaggaaccgattttacattcaccattagccgtttacagccggaggataccgcgacgtatttttgccagcacttcgatcatctgcctttagcatttggcggcggtactaaagtggagatcaaaggagcgacgccgcctgagactggagcagagaccgaatcacctggtgagacgacgggcgggtcagccgaaagcgagccaccgggggaagggcaggttcaattgcaagaaagtggaccgggcgccgtcaaacccagcgaaaccctctccctgacctgcacagtcagcggagggtctgtgagctcaggcgactactattggacctggattagacaatcaccaggtaaaggtcttgagtggattggccacatctactatagcggtaacaccaactataatccgagcctgaaaagtcgtctgaccatcagcatcgacaccagcaaaacccagtttagcctgaaattaagcagcgttacagcagcggatacagcgacctactattgtgtccgtgatcgcgttactggcgcatttgatatttgggggcagggaacagcagttactgtgtcaagcggaggaggtggcagtgaactggttgttacacaagaaccgtccttaacagttagtccggggggcaccgtcacattaacatgtcgttcaagtacaggtgcagtaaccacgtccaactatgcaaattgggttcaacagaagcccggacaggccccgagaggtttaataggtggaacaaacaaaagagcacctggtacacctgcccggttctccggatcctctctcggcggttccgcagcattaaccttaagtggtgttcagccggaagatgaagcggagtattactgcgcactttggtatagcaacttatgggtgtttggaggcggtacaaaattgaccgttctgggtgcgacgccgcccgaaacgggcgcggagacggagtccccaggtgaaaccactggtggaagcgcagaatcagagccaccgggcgagggggaagtacaattacaggagtccggcggaggtctggttcagcctggtggtagcctcaaactgtcctgcgcagcaagcggttttacctttaacacctacgccatgaactgggtgcgtcaagctcctggtaaaggcttagaatgggttgcgcgtattcgtagcaaatacaacaactatgccacctattacgcggacagtgtaaaagaccgtttcaccatcagccgcgatgatagcaaaaatacagcctatctgcagatgaacaacctgaagaccgaagacacggccgtctactactgcgtgcgtcatggcaattttggcaacagctatgttagctggttcgcgtattggggccagggaacactggtcacggtttcctcagggactgctgaggcggctagcgcctccggagaagctggaagaagcgccaatcacacaccagctggacttacaggcccgcctggtagccccgcggggagccctacaagcactgaggagggcacatctgagtccgctacccctgagagtggacccgggacaagcactgagcctagcgaaggaagcgcaccaggttcccccgctgggagccccacaagcacagaagagggaacttctaccgagccctctgagggctcagcccctggaactagcacagagccctccgaaggcagtgcaccgggtacttccgaaagcgcaactccggaatccggccctggttctgagcctgctacttccggctctgaaactccaggtagcgagccagcgacttctggttctgaaactccaggttcaccggcgggtagcccgacgagcacggaggaaggtacctctgagtcggccactcctgagtccggtccgggcacgagcaccgagccgagcgagggttcagccccgggtaccagcacggagccgtccgagggtagcgcaccgggttctccggcgggctcccctacgtctacggaagagggtacgtccactgaacctagcgagggcagcgcgccaggcaccagcactgaaccgagcgaaggcagcgcacctggcactagcgagtctgcgactccggagagcggtccgggtacgagcacggaaccaagcgaaggcagcgccccaggtacctctgaatctgctaccccagaatctggcccgggttccgagccagctacctctggttctgaaaccccaggtacttccactgaaccaagcgaaggtagcgctcctggcacttctactgaaccatccgaaggttccgctcctggtacgtctgaaagcgctacccctgaaagcggcccaggcacctctgaaagcgctactcctgagagcggtccaggctctccagcaggttctccaacctccactgaagaaggcacctctgagtctgctacccctgaatctggtcctggctccgaacctgctacctctggttccgaaactccaggtacctcggaatctgcgactccggaatctggcccgggcacgagcacggagccgtctgagggtagcgcaccaggtaccagcactgagccttctgagggctctgcaccgggtacctccacggaaccttcggaaggttctgcgccgggtacctccactgagccatccgagggttcagcaccaggtactagcacggaaccgtccgagggctctgcaccaggtacgagcaccgaaccgtcggagggtagcgctccaggtagcccagcgggctctccgacaagcaccgaagaaggcaccagcaccgagccgtccgaaggttccgcaccaggtacaagcgagagcgcgactcctgaatctggtccgggtagcgagcctgcaaccagcggttctgagacgccgggcacttccgaatctgcgaccccggagtccggtccaggttcagagccggcgacgagcggttcggaaacgccgggtacgtctgaatcagccacgccggagtctggtccgggtacctcgaccgaaccaagcgaaggttcggcaccgggtactagcgagagcgcaacccctgaaagcggtccgggcagcccggcaggttctccaaccagcaccgaagaaggttcccctgctggtagcccgacctctacggaggaaggtagccctgcaggttccccaacttctactgaggaaggtacttctgagtccgctaccccagaaagcggtcctggtacctccactgaaccgtctgaaggctctgcaccaggcacttctgagtctgctactccagaaagcggcccaggttctgaaccagcaacttctggctctgagactccaggcacttctgagtccgcaacgcctgaatccggtcctggttctgaaccagctacttccggcagcgaaaccccaggtacctctgagtctgcgactccagagtctggtcctggtacttccactgagcctagcgagggttccgcaccaggttctccggctggtagcccgaccagcacggaggagggtacgtctgaatctgcaacgccggaatcgggcccaggttcggagcctgcaacgtctggcagcgaaaccccgggtacctccgaatctgctacaccggaaagcggtcctggcagccctgctggttctccaacctctaccgaggagggttcaccggcaggtagcccgactagcactgaagaaggtactagcacggagccgagcgagggtagtgctccgggtacgagcgagagcgcaacgccagagagcggtccaggcaccagcgaatcggccacccctgagagcggcccaggtacttctgagagcgccactcctgaatccggccctggtagcgagccggcaacctccggctcagaaactcctggttcggaaccagcgaccagcggttctgaaactccgggtagcccggcaggcagcccaacgagcaccgaagagggtaccagcacggaaccgagcgagggttctgccccgggtacttccaccgaaccatcggagggctctgcacctggtagcgaacctgcgacgtctggttctgaaacgccgggtaccagcgaaagcgctaccccagaatccggtccgggcactagcaccgagccatcggagggcgccgcagaaccagaggcg

SEQ ID NO: 829 - DNA, 5229 bp, Artificial Sequence
  Description of Artificial Sequence: Synthetic polynucleotide
caccatcatcaccatcactccccagcaggcagcccgaccagcaccgaggagggtacgagcgagtcggctactccagagagcggtccgggtacctctacggaaccgtccgaaggtagcgctccaggcacgtctgaaagcgcgacgccggaaagcggtccaggcagcgagccggcgacctccggtagcgaaacgcctggtacctcggagtcagcgactccggaaagcggtccgggtagcgaacctgcaacgagcggtagcgagactccaggcactagcgaatccgcaactccggagtcgggtccgggcacctctacggagcctagcgagggctcagcaccaggtagccctgcaggttccccgacgtcaaccgaggaaggtacaagcgaaagcgccacccctgagtcgggccctggcagcgaaccggcaactagcggcagcgagactccgggtaccagcgagtctgctacgccagagagcggcccaggttcgccagcgggttcgccgactagcacggaggagggcagcccagcgggtagcccgaccagcactgaggagggtacgtccaccgaaccgagcgaaggtagcgcaccaggtacctccgagtctgccacccctgaatccggtccaggtaccagcgaatcagccaccccggagtcgggtccaggtacgagcgaatctgctaccccggaatccggcccaggcagcgaacctgctactagcggcagcgaaacgccgggcagcgaacctgccacgtcaggcagcgagacgccgggttcccctgcaggctccccgaccagcactgaggagggcacctccaccgaaccatcagaaggtagcgcgcctggtacgtcaaccgaaccttccgagggcagcgcaccgggtggctcagcgcctgaggcaggtcgttctgctaaccatacccctgcaggattaactggccccgccaccagcgggagcgagacccccgggactgatatccagatgacccaaagccctagttcattaagcgcatcggtgggtgaccgggtaaccattacctgtcaagcaagtcaggatatcagcaactacctgaactggtaccagcagaaacccggaaaagcgccgaaactgctgatctatgatgccagcaatctggaaacaggtgttcctagccgtttctctggatcaggttcaggaaccgattttacattcaccattagccgtttacagccggaggataccgcgacgtatttttgccagcacttcgatcatctgcctttagcatttggcggcggtactaaagtggagatcaaaggagcgacgccgcctgagactggagcagagaccgaatcacctggtgagacgacgggcgggtcagccgaaagcgagccaccgggggaagggcaggttcaattgcaagaaagtggaccgggcgccgtcaaacccagcgaaaccctctccctgacctgcacagtcagcggagggtctgtgagctcaggcgactactattggacctggattagacaatcaccaggtaaaggtcttgagtggattggccacatctactatagcggtaacaccaactataatccgagcctgaaaagtcgtctgaccatcagcatcgacaccagcaaaacccagtttagcctgaaattaagcagcgttacagcagcggatacagcgacctactattgtgtccgtgatcgcgttactggcgcatttgatatttgggggcagggaacaacagttactgtgtcaagtggaggaggtggcagtgaactggttgttacacaagaaccgtccttaacagttagtccggggggcaccgtcacattaacatgtcgttcaagtacaggtgcagtaaccacgtccaactatgcaaattgggttcaacagaagcccggacaggccccgagaggtttaataggtggaacaaacaaaagagcacctggtacacctgcccggttctccggatcctctctcggcggttccgcagcattaaccttaagtggtgttcagccggaagatgaagcggagtattactgcgcactttggtatagcaacttatgggtgtttggaggcggtacaaaattgaccgttctgggtgcgacgccgcccgaaacgggcgcggagacggagtccccaggtgaaaccactggtggaagcgcagaatcagagccaccgggcgagggggaagtacaattacaggagtccggcggaggtctggttcagcctggtggtagcctcaaactgtcctgcgcagcaagcggttttacctttaacacctacgccatgaactgggtgcgtcaagctcctggtaaaggcttagaatgggttgcgcgtattcgtagcaaatacaacaactatgccacctattacgcggacagtgtaaaagaccgtttcaccatcagccgcgatgatagcaaaaatacagcctatctgcagatgaacaacctgaagaccgaagacacggccgtctactactgcgtgcgtcatggcaattttggcaacagctatgttagctggttcgcgtattggggccagggaacactggtcacggtttcctcagggactgctgaggcggctagcgcctccggagaagctggaagaagcgccaatcacacaccagctggacttacaggcccgcctggtagccccgcggggagccctacaagcactgaggagggcacatctgagtccgctacccctgagagtggacccgggacaagcactgagcctagcgaaggaagcgcaccaggttcccccgctgggagccccacaagcacagaagagggaacttctaccgagccctctgagggctcagcccctggaactagcacagagccctccgaaggcagtgcaccgggtacttccgaaagcgcaactccggaatccggccctggttctgagcctgctacttccggctctgaaactccaggtagcgagccagcgacttctggttctgaaactccaggttcaccggcgggtagcccgacgagcacggaggaaggtacctctgagtcggccactcctgagtccggtccgggcacgagcaccgagccgagcgagggttcagccccgggtaccagcacggagccgtccgagggtagcgcaccgggttctccggcgggctcccctacgtctacggaagagggtacgtccactgaacctagcgagggcagcgcgccaggcaccagcactgaaccgagcgaaggcagcgcacctggcactagcgagtctgcgactccggagagcggtccgggtacgagcacggaaccaagcgaaggcagcgccccaggtacctctgaatctgctaccccagaatctggcccgggttccgagccagctacctctggttctgaaaccccaggtacttccactgaaccaagcgaaggtagcgctcctggcacttctactgaaccatccgaaggttccgctcctggtacgtctgaaagcgctacccctgaaagcggcccaggcacctctgaaagcgctactcctgagagcggtccaggctctccagcaggttctccaacctccactgaagaaggcacctctgagtctgctacccctgaatctggtcctggctccgaacctgctacctctggttccgaaactccaggtacctcggaatctgcgactccggaatctggcccgggcacgagcacggagccgtctgagggtagcgcaccaggtaccagcactgagccttctgagggctctgcaccgggtacctccacggaaccttcggaaggttctgcgccgggtacctccactgagccatccgagggttcagcaccaggtactagcacggaaccgtccgagggctctgcaccaggtacgagcaccgaaccgtcggagggtagcgctccaggtagcccagcgggctctccgacaagcaccgaagaaggcaccagcaccgagccgtccgaaggttccgcaccaggtacaagcgagagcgcgactcctgaatctggtccgggtagcgagcctgcaaccagcggttctgagacgccgggcacttccgaatctgcgaccccggagtccggtccaggttcagagccggcgacgagcggttcggaaacgccgggtacgtctgaatcagccacgccggagtctggtccgggtacctcgaccgaaccaagcgaaggttcggcaccgggtactagcgagagcgcaacccctgaaagcggtccgggcagcccggcaggttctccaaccagcaccgaagaaggttcccctgctggtagcccgacctctacggaggaaggtagccctgcaggttccccaacttctactgaggaaggtacttctgagtccgctaccccagaaagcggtcctggtacctccactgaaccgtctgaaggctctgcaccaggcacttctgagtctgctactccagaaagcggcccaggttctgaaccagcaacttctggctctgagactccaggcacttctgagtccgcaacgcctgaatccggtcctggttctgaaccagctacttccggcagcgaaaccccaggtacctctgagtctgcgactccagagtctggtcctggtacttccactgagcctagcgagggttccgcaccaggttctccggctggtagcccgaccagcacggaggagggtacgtctgaatctgcaacgccggaatcgggcccaggttcggagcctgcaacgtctggcagcgaaaccccgggtacctccgaatctgctacaccggaaagcggtcctggcagccctgctggttctccaacctctaccgaggagggttcaccggcaggtagcccgactagcactgaagaaggtactagcacggagccgagcgagggtagtgctccgggtacgagcgagagcgcaacgccagagagcggtccaggcaccagcgaatcggccacccctgagagcggcccaggtacttctgagagcgccactcctgaatccggccctggtagcgagccggcaacctccggctcagaaactcctggttcggaaccagcgaccagcggttctgaaactccgggtagcccggcaggcagcccaacgagcaccgaagagggtaccagcacggaaccgagcgagggttctgccccgggtacttccaccgaaccatcggagggctctgcacctggtagcgaacctgcgacgtctggttctgaaacgccgggtaccagcgaaagcgctaccccagaatccggtccgggcactagcaccgagccatcggagggcgccgcagaaccagaggcg

SEQ ID NO: 830 - DNA, 5229 bp, Artificial Sequence
  Description of Artificial Sequence: Synthetic polynucleotide
caccatcatcaccatcactccccagcaggcagcccgaccagcaccgaggagggtacgagcgagtcggctactccagagagcggtccgggtacctctacggaaccgtccgaaggtagcgctccaggcacgtctgaaagcgcgacgccggaaagcggtccaggcagcgagccggcgacctccggtagcgaaacgcctggtacctcggagtcagcgactccggaaagcggtccgggtagcgaacctgcaacgagcggtagcgagactccaggcactagcgaatccgcaactccggagtcgggtccgggcacctctacggagcctagcgagggctcagcaccaggtagccctgcaggttccccgacgtcaaccgaggaaggtacaagcgaaagcgccacccctgagtcgggccctggcagcgaaccggcaactagcggcagcgagactccgggtaccagcgagtctgctacgccagagagcggcccaggttcgccagcgggttcgccgactagcacggaggagggcagcccagcgggtagcccgaccagcactgaggagggtacgtccaccgaaccgagcgaaggtagcgcaccaggtacctccgagtctgccacccctgaatccggtccaggtaccagcgaatcagccaccccggagtcgggtccaggtacgagcgaatctgctaccccggaatccggcccaggcagcgaacctgctactagcggcagcgaaacgccgggcagcgaacctgccacgtcaggcagcgagacgccgggttcccctgcaggctccccgaccagcactgaggagggcacctccaccgaaccatcagaaggtagcgcgcctggtacgtcaaccgaaccttccgagggcagcgcaccgggtggctcagcgcctgaggcaggtcgttctgctaaccatacccctgcaggattaactggccccgccaccagcgggagcgagacccccgggactgatatccagatgacccaaagccctagttcattaagcgcatcggtgggtgaccgggtaaccattacctgtcaagcaagtcaggatatcagcaactacctgaactggtaccagcagaaacccggaaaagcgccgaaactgctgatctatgatgccagcaatctggaaacaggtgttcctagccgtttctctggatcaggttcaggaaccgattttacattcaccattagccgtttacagccggaggataccgcgacgtatttttgccagcacttcgatcatctgcctttagcatttggcggcggtactaaagtggagatcaaaggagcgacgccgcctgagactggagcagagaccgaatcacctggtgagacgacgggcgggtcagccgaaagcgagccaccgggggaagggcaggttcaattgcaagaaagtggaccgggcttagtcaaacccagccagaccctctccctgacctgcacagtcagcggagggtctgtgagctcaggcgactactattggacctggattagacaacgtccaggtaaaggtcttgagtggattggccacatctactatagcggtaacaccaactataatccgagcctgaaaagtcgtctgaccatcagcatcgacaccagcaaaacccagtttagcctgaaattaagcagcgttacagcagcggatacagcgatttactattgtgtccgtgatcgcgttactggcgcatttgatatttgggggcagggaacaatggttactgtgtcaagtggaggaggtggcagtgaactggttgttacacaagaaccgtccttaacagttagtccggggggcaccgtcacattaacatgtcgttcaagtacaggtgcagtaaccacgtccaactatgcaaattgggttcaacagaagcccggacaggccccgagaggtttaataggtggaacaaacaaaagagcacctggtacacctgcccggttctccggatcctctctcggcggttccgcagcattaaccttaagtggtgttcagccggaagatgaagcggagtattactgcgcactttggtatagcaacttatgggtgtttggaggcggtacaaaattgaccgttctgggtgcgacgccgcccgaaacgggcgcggagacggagtccccaggtgaaaccactggtggaagcgcagaatcagagccaccgggcgagggggaagtacaattacaggagtccggcggaggtctggttcagcctggtggtagcctcaaactgtcctgcgcagcaagcggttttacctttaacacctacgccatgaactgggtgcgtcaagctcctggtaaaggcttagaatgggttgcgcgtattcgtagcaaatacaacaactatgccacctattacgcggacagtgtaaaagaccgtttcaccatcagccgcgatgatagcaaaaatacagcctatctgcagatgaacaacctgaagaccgaagacacggccgtctactactgcgtgcgtcatggcaattttggcaacagctatgttagctggttcgcgtattggggccagggaacactggtcacggtttcctcagggactgctgaggcggctagcgcctccggagaagctggaagaagcgccaatcacacaccagctggacttacaggcccgcctggtagccccgcggggagccctacaagcactgaggagggcacatctgagtccgctacccctgagagtggacccgggacaagcactgagcctagcgaaggaagcgcaccaggttcccccgctgggagccccacaagcacagaagagggaacttctaccgagccctctgagggctcagcccctggaactagcacagagccctccgaaggcagtgcaccgggtacttccgaaagcgcaactccggaatccggccctggttctgagcctgctacttccggctctgaaactccaggtagcgagccagcgacttctggttctgaaactccaggttcaccggcgggtagcccgacgagcacggaggaaggtacctctgagtcggccactcctgagtccggtccgggcacgagcaccgagccgagcgagggttcagccccgggtaccagcacggagccgtccgagggtagcgcaccgggttctccggcgggctcccctacgtctacggaagagggtacgtccactgaacctagcgagggcagcgcgccaggcaccagcactgaaccgagcgaaggcagcgcacctggcactagcgagtctgcgactccggagagcggtccgggtacgagcacggaaccaagcgaaggcagcgccccaggtacctctgaatctgctaccccagaatctggcccgggttccgagccagctacctctggttctgaaaccccaggtacttccactgaaccaagcgaaggtagcgctcctggcacttctactgaaccatccgaaggttccgctcctggtacgtctgaaagcgctacccctgaaagcggcccaggcacctctgaaagcgctactcctgagagcggtccaggctctccagcaggttctccaacctccactgaagaaggcacctctgagtctgctacccctgaatctggtcctggctccgaacctgctacctctggttccgaaactccaggtacctcggaatctgcgactccggaatctggcccgggcacgagcacggagccgtctgagggtagcgcaccaggtaccagcactgagccttctgagggctctgcaccgggtacctccacggaaccttcggaaggttctgcgccgggtacctccactgagccatccgagggttcagcaccaggtactagcacggaaccgtccgagggctctgcaccaggtacgagcaccgaaccgtcggagggtagcgctccaggtagcccagcgggctctccgacaagcaccgaagaaggcaccagcaccgagccgtccgaaggttccgcaccaggtacaagcgagagcgcgactcctgaatctggtccgggtagcgagcctgcaaccagcggttctgagacgccgggcacttccgaatctgcgaccccggagtccggtccaggttcagagccggcgacgagcggttcggaaacgccgggtacgtctgaatcagccacgccggagtctggtccgggtacctcgaccgaaccaagcgaaggttcggcaccgggtactagcgagagcgcaacccctgaaagcggtccgggcagcccggcaggttctccaaccagcaccgaagaaggttcccctgctggtagcccgacctctacggaggaaggtagccctgcaggttccccaacttctactgaggaaggtacttctgagtccgctaccccagaaagcggtcctggtacctccactgaaccgtctgaaggctctgcaccaggcacttctgagtctgctactccagaaagcggcccaggttctgaaccagcaacttctggctctgagactccaggcacttctgagtccgcaacgcctgaatccggtcctggttctgaaccagctacttccggcagcgaaaccccaggtacctctgagtctgcgactccagagtctggtcctggtacttccactgagcctagcgagggttccgcaccaggttctccggctggtagcccgaccagcacggaggagggtacgtctgaatctgcaacgccggaatcgggcccaggttcggagcctgcaacgtctggcagcgaaaccccgggtacctccgaatctgctacaccggaaagcggtcctggcagccctgctggttctccaacctctaccgaggagggttcaccggcaggtagcccgactagcactgaagaaggtactagcacggagccgagcgagggtagtgctccgggtacgagcgagagcgcaacgccagagagcggtccaggcaccagcgaatcggccacccctgagagcggcccaggtacttctgagagcgccactcctgaatccggccctggtagcgagccggcaacctccggctcagaaactcctggttcggaaccagcgaccagcggttctgaaactccgggtagcccggcaggcagcccaacgagcaccgaagagggtaccagcacggaaccgagcgagggttctgccccgggtacttccaccgaaccatcggagggctctgcacctggtagcgaacctgcgacgtctggttctgaaacgccgggtaccagcgaaagcgctaccccagaatccggtccgggcactagcaccgagccatcggagggcgccgcagaaccagaggcg

SEQ ID NO: 831 - DNA, 5229 bp, Artificial Sequence
  Description of Artificial Sequence: Synthetic polynucleotide
caccatcatcaccatcactccccagcaggcagcccgaccagcaccgaggagggtacgagcgagtcggctactccagagagcggtccgggtacctctacggaaccgtccgaaggtagcgctccaggcacgtctgaaagcgcgacgccggaaagcggtccaggcagcgagccggcgacctccggtagcgaaacgcctggtacctcggagtcagcgactccggaaagcggtccgggtagcgaacctgcaacgagcggtagcgagactccaggcactagcgaatccgcaactccggagtcgggtccgggcacctctacggagcctagcgagggctcagcaccaggtagccctgcaggttccccgacgtcaaccgaggaaggtacaagcgaaagcgccacccctgagtcgggccctggcagcgaaccggcaactagcggcagcgagactccgggtaccagcgagtctgctacgccagagagcggcccaggttcgccagcgggttcgccgactagcacggaggagggcagcccagcgggtagcccgaccagcactgaggagggtacgtccaccgaaccgagcgaaggtagcgcaccaggtacctccgagtctgccacccctgaatccggtccaggtaccagcgaatcagccaccccggagtcgggtccaggtacgagcgaatctgctaccccggaatccggcccaggcagcgaacctgctactagcggcagcgaaacgccgggcagcgaacctgccacgtcaggcagcgagacgccgggttcccctgcaggctccccgaccagcactgaggagggcacctccaccgaaccatcagaaggtagcgcgcctggtacgtcaaccgaaccttccgagggcagcgcaccgggtggctcagcgcctgaggcaggtcgttctgctaaccatacccctgcaggattaactggccccgccaccagcgggagcgagacccccgggactgatatccagatgacccaaagccctagttcattaagcgcatcggtgggtgaccgggtaaccattacctgtcaagcaagtcaggatatcagcaactacctgaactggtaccagcagaaacccggaaaagcgccgaaactgctgatctatgatgccagcaatctggaaacaggtgttcctagccgtttctctggatcaggttcaggaaccgattttacattcaccattagccgtttacagccggaggataccgcgacgtatttttgccagcacttcgatcatctgcctttagcatttggcggcggtactaaagtggagatcaaaggagcgacgccgcctgagactggagcagagaccgaatcacctggtgagacgacgggcgggtcagccgaaagcgagccaccgggggaagggcaggttcaattgcaagaaagtggaccgggcgccgtcaaacccagccagaccctctccctgacctgcacagtcagcggagggtctgtgagctcaggcgactactattggacctggattagacaacgtccaggtaaaggtcttgagtggattggccacatctactatagcggtaacaccaactataatccgagcctgaaaagtcgtctgaccatcagcatcgacaccagcaaaacccagtttagcctgaaattaagcagcgttacagcagcggatacagcgacctactattgtgtccgtgatcgcgttactggcgcatttgatatttgggggcagggaacagcagttactgtgtcaagtggaggaggtggcagtgaactggttgttacacaagaaccgtccttaacagttagtccggggggcaccgtcacattaacatgtcgttcaagtacaggtgcagtaaccacgtccaactatgcaaattgggttcaacagaagcccggacaggccccgagaggtttaataggtggaacaaacaaaagagcacctggtacacctgcccggttctccggatcctctctcggcggttccgcagcattaaccttaagtggtgttcagccggaagatgaagcggagtattactgcgcactttggtatagcaacttatgggtgtttggaggcggtacaaaattgaccgttctgggtgcgacgccgcccgaaacgggcgcggagacggagtccccaggtgaaaccactggtggaagcgcagaatcagagccaccgggcgagggggaagtacaattacaggagtccggcggaggtctggttcagcctggtggtagcctcaaactgtcctgcgcagcaagcggttttacctttaacacctacgccatgaactgggtgcgtcaagctcctggtaaaggcttagaatgggttgcgcgtattcgtagcaaatacaacaactatgccacctattacgcggacagtgtaaaagaccgtttcaccatcagccgcgatgatagcaaaaatacagcctatctgcagatgaacaacctgaagaccgaagacacggccgtctactactgcgtgcgtcatggcaattttggcaacagctatgttagctggttcgcgtattggggccagggaacactggtcacggtttcctcagggactgctgaggcggctagcgcctccggagaagctggaagaagcgccaatcacacaccagctggacttacaggcccgcctggtagccccgcggggagccctacaagcactgaggagggcacatctgagtccgctacccctgagagtggacccgggacaagcactgagcctagcgaaggaagcgcaccaggttcccccgctgggagccccacaagcacagaagagggaacttctaccgagccctctgagggctcagcccctggaactagcacagagccctccgaaggcagtgcaccgggtacttccgaaagcgcaactccggaatccggccctggttctgagcctgctacttccggctctgaaactccaggtagcgagccagcgacttctggttctgaaactccaggttcaccggcgggtagcccgacgagcacggaggaaggtacctctgagtcggccactcctgagtccggtccgggcacgagcaccgagccgagcgagggttcagccccgggtaccagcacggagccgtccgagggtagcgcaccgggttctccggcgggctcccctacgtctacggaagagggtacgtccactgaacctagcgagggcagcgcgccaggcaccagcactgaaccgagcgaaggcagcgcacctggcactagcgagtctgcgactccggagagcggtccgggtacgagcacggaaccaagcgaaggcagcgccccaggtacctctgaatctgctaccccagaatctggcccgggttccgagccagctacctctggttctgaaaccccaggtacttccactgaaccaagcgaaggtagcgctcctggcacttctactgaaccatccgaaggttccgctcctggtacgtctgaaagcgctacccctgaaagcggcccaggcacctctgaaagcgctactcctgagagcggtccaggctctccagcaggttctccaacctccactgaagaaggcacctctgagtctgctacccctgaatctggtcctggctccgaacctgctacctctggttccgaaactccaggtacctcggaatctgcgactccggaatctggcccgggcacgagcacggagccgtctgagggtagcgcaccaggtaccagcactgagccttctgagggctctgcaccgggtacctccacggaaccttcggaaggttctgcgccgggtacctccactgagccatccgagggttcagcaccaggtactagcacggaaccgtccgagggctctgcaccaggtacgagcaccgaaccgtcggagggtagcgctccaggtagcccagcgggctctccgacaagcaccgaagaaggcaccagcaccgagccgtccgaaggttccgcaccaggtacaagcgagagcgcgactcctgaatctggtccgggtagcgagcctgcaaccagcggttctgagacgccgggcacttccgaatctgcgaccccggagtccggtccaggttcagagccggcgacgagcggttcggaaacgccgggtacgtctgaatcagccacgccggagtctggtccgggtacctcgaccgaaccaagcgaaggttcggcaccgggtactagcgagagcgcaacccctgaaagcggtccgggcagcccggcaggttctccaaccagcaccgaagaaggttcccctgctggtagcccgacctctacggaggaaggtagccctgcaggttccccaacttctactgaggaaggtacttctgagtccgctaccccagaaagcggtcctggtacctccactgaaccgtctgaaggctctgcaccaggcacttctgagtctgctactccagaaagcggcccaggttctgaaccagcaacttctggctctgagactccaggcacttctgagtccgcaacgcctgaatccggtcctggttctgaaccagctacttccggcagcgaaaccccaggtacctctgagtctgcgactccagagtctggtcctggtacttccactgagcctagcgagggttccgcaccaggttctccggctggtagcccgaccagcacggaggagggtacgtctgaatctgcaacgccggaatcgggcccaggttcggagcctgcaacgtctggcagcgaaaccccgggtacctccgaatctgctacaccggaaagcggtcctggcagccctgctggttctccaacctctaccgaggagggttcaccggcaggtagcccgactagcactgaagaaggtactagcacggagccgagcgagggtagtgctccgggtacgagcgagagcgcaacgccagagagcggtccaggcaccagcgaatcggccacccctgagagcggcccaggtacttctgagagcgccactcctgaatccggccctggtagcgagccggcaacctccggctcagaaactcctggttcggaaccagcgaccagcggttctgaaactccgggtagcccggcaggcagcccaacgagcaccgaagagggtaccagcacggaaccgagcgagggttctgccccgggtacttccaccgaaccatcggagggctctgcacctggtagcgaacctgcgacgtctggttctgaaacgccgggtaccagcgaaagcgctaccccagaatccggtccgggcactagcaccgagccatcggagggcgccgcagaaccagaggcg

SEQ ID NO: 832 - DNA, 5229 bp, Artificial Sequence
  Description of Artificial Sequence: Synthetic polynucleotide
caccatcatcaccatcactccccagcaggcagcccgaccagcaccgaggagggtacgagcgagtcggctactccagagagcggtccgggtacctctacggaaccgtccgaaggtagcgctccaggcacgtctgaaagcgcgacgccggaaagcggtccaggcagcgagccggcgacctccggtagcgaaacgcctggtacctcggagtcagcgactccggaaagcggtccgggtagcgaacctgcaacgagcggtagcgagactccaggcactagcgaatccgcaactccggagtcgggtccgggcacctctacggagcctagcgagggctcagcaccaggtagccctgcaggttccccgacgtcaaccgaggaaggtacaagcgaaagcgccacccctgagtcgggccctggcagcgaaccggcaactagcggcagcgagactccgggtaccagcgagtctgctacgccagagagcggcccaggttcgccagcgggttcgccgactagcacggaggagggcagcccagcgggtagcccgaccagcactgaggagggtacgtccaccgaaccgagcgaaggtagcgcaccaggtacctccgagtctgccacccctgaatccggtccaggtaccagcgaatcagccaccccggagtcgggtccaggtacgagcgaatctgctaccccggaatccggcccaggcagcgaacctgctactagcggcagcgaaacgccgggcagcgaacctgccacgtcaggcagcgagacgccgggttcccctgcaggctccccgaccagcactgaggagggcacctccaccgaaccatcagaaggtagcgcgcctggtacgtcaaccgaaccttccgagggcagcgcaccgggtggctcagcgcctgaggcaggtcgttctgctaaccatacccctgcaggattaactggccccgccaccagcgggagcgagacccccgggactgatatccagatgacccaaagccctagttcattaagcgcatcggtgggtgaccgggtaaccattacctgtcaagcaagtcaggatatcagcaactacctgaactggtaccagcagaaacccggaaaagcgccgaaactgctgatctatgatgccagcaatctggaaacaggtgttcctagccgtttctctggatcaggttcaggaaccgattttacattcaccattagccgtttacagccggaggataccgcgacgtatttttgccagcacttcgatcatctgcctttagcatttggcggcggtactaaagtggagatcaaaggagcgacgccgcctgagactggagcagagaccgaatcacctggtgagacgacgggcgggtcagccgaaagcgagccaccgggggaagggcaggttcaattgcaagaaagtggaccgggcgccgtcaaacccagccagaccctctccctgacctgcacagtcagcggagggtctgtgagctcaggcgactactattggacctggattagacaacgtccaggtaaaggtcttgagtggattggccacatctactatagcggtaacaccaactataatccgagcctgaaaagtcgtctgaccatcagcatcgacaccagcaaaacccagtttagcctgaaattaagcagcgttacagcagcggatacagcgacctactattgtgtccgtgatcgcgttactggcgcatttgatatttgggggcagggaacaacagttactgtgtcaagtggaggaggtggcagtgaactggttgttacacaagaaccgtccttaacagttagtccggggggcaccgtcacattaacatgtcgttcaagtacaggtgcagtaaccacgtccaactatgcaaattgggttcaacagaagcccggacaggccccgagaggtttaataggtggaacaaacaaaagagcacctggtacacctgcccggttctccggatcctctctcggcggttccgcagcattaaccttaagtggtgttcagccggaagatgaagcggagtattactgcgcactttggtatagcaacttatgggtgtttggaggcggtacaaaattgaccgttctgggtgcgacgccgcccgaaacgggcgcggagacggagtccccaggtgaaaccactggtggaagcgcagaatcagagccaccgggcgagggggaagtacaattacaggagtccggcggaggtctggttcagcctggtggtagcctcaaactgtcctgcgcagcaagcggttttacctttaacacctacgccatgaactgggtgcgtcaagctcctggtaaaggcttagaatgggttgcgcgtattcgtagcaaatacaacaactatgccacctattacgcggacagtgtaaaagaccgtttcaccatcagccgcgatgatagcaaaaatacagcctatctgcagatgaacaacctgaagaccgaagacacggccgtctactactgcgtgcgtcatggcaattttggcaacagctatgttagctggttcgcgtattggggccagggaacactggtcacggtttcctcagggactgctgaggcggctagcgcctccggagaagctggaagaagcgccaatcacacaccagctggacttacaggcccgcctggtagccccgcggggagccctacaagcactgaggagggcacatctgagtccgctacccctgagagtggacccgggacaagcactgagcctagcgaaggaagcgcaccaggttcccccgctgggagccccacaagcacagaagagggaacttctaccgagccctctgagggctcagcccctggaactagcacagagccctccgaaggcagtgcaccgggtacttccgaaagcgcaactccggaatccggccctggttctgagcctgctacttccggctctgaaactccaggtagcgagccagcgacttctggttctgaaactccaggttcaccggcgggtagcccgacgagcacggaggaaggtacctctgagtcggccactcctgagtccggtccgggcacgagcaccgagccgagcgagggttcagccccgggtaccagcacggagccgtccgagggtagcgcaccgggttctccggcgggctcccctacgtctacggaagagggtacgtccactgaacctagcgagggcagcgcgccaggcaccagcactgaaccgagcgaaggcagcgcacctggcactagcgagtctgcgactccggagagcggtccgggtacgagcacggaaccaagcgaaggcagcgccccaggtacctctgaatctgctaccccagaatctggcccgggttccgagccagctacctctggttctgaaaccccaggtacttccactgaaccaagcgaaggtagcgctcctggcacttctactgaaccatccgaaggttccgctcctggtacgtctgaaagcgctacccctgaaagcggcccaggcacctctgaaagcgctactcctgagagcggtccaggctctccagcaggttctccaacctccactgaagaaggcacctctgagtctgctacccctgaatctggtcctggctccgaacctgctacctctggttccgaaactccaggtacctcggaatctgcgactccggaatctggcccgggcacgagcacggagccgtctgagggtagcgcaccaggtaccagcactgagccttctgagggctctgcaccgggtacctccacggaaccttcggaaggttctgcgccgggtacctccactgagccatccgagggttcagcaccaggtactagcacggaaccgtccgagggctctgcaccaggtacgagcaccgaaccgtcggagggtagcgctccaggtagcccagcgggctctccgacaagcaccgaagaaggcaccagcaccgagccgtccgaaggttccgcaccaggtacaagcgagagcgcgactcctgaatctggtccgggtagcgagcctgcaaccagcggttctgagacgccgggcacttccgaatctgcgaccccggagtccggtccaggttcagagccggcgacgagcggttcggaaacgccgggtacgtctgaatcagccacgccggagtctggtccgggtacctcgaccgaaccaagcgaaggttcggcaccgggtactagcgagagcgcaacccctgaaagcggtccgggcagcccggcaggttctccaaccagcaccgaagaaggttcccctgctggtagcccgacctctacggaggaaggtagccctgcaggttccccaacttctactgaggaaggtacttctgagtccgctaccccagaaagcggtcctggtacctccactgaaccgtctgaaggctctgcaccaggcacttctgagtctgctactccagaaagcggcccaggttctgaaccagcaacttctggctctgagactccaggcacttctgagtccgcaacgcctgaatccggtcctggttctgaaccagctacttccggcagcgaaaccccaggtacctctgagtctgcgactccagagtctggtcctggtacttccactgagcctagcgagggttccgcaccaggttctccggctggtagcccgaccagcacggaggagggtacgtctgaatctgcaacgccggaatcgggcccaggttcggagcctgcaacgtctggcagcgaaaccccgggtacctccgaatctgctacaccggaaagcggtcctggcagccctgctggttctccaacctctaccgaggagggttcaccggcaggtagcccgactagcactgaagaaggtactagcacggagccgagcgagggtagtgctccgggtacgagcgagagcgcaacgccagagagcggtccaggcaccagcgaatcggccacccctgagagcggcccaggtacttctgagagcgccactcctgaatccggccctggtagcgagccggcaacctccggctcagaaactcctggttcggaaccagcgaccagcggttctgaaactccgggtagcccggcaggcagcccaacgagcaccgaagagggtaccagcacggaaccgagcgagggttctgccccgggtacttccaccgaaccatcggagggctctgcacctggtagcgaacctgcgacgtctggttctgaaacgccgggtaccagcgaaagcgctaccccagaatccggtccgggcactagcaccgagccatcggagggcgccgcagaaccagaggcg

SEQ ID NO: 833 - DNA, 4260 bp, Artificial Sequence
  Description of Artificial Sequence: Synthetic polynucleotide
gatatccagatgacccagagcccttcttccctgtccgcatccgtcggcgatcgtgtcacgattacctgtcgcagcactaagagcctgctgcactcaaacggtatcacgtacctgtactggtaccagcagaagccgggcaaagcgccgaagctgctgatttatcagatgagcaacctggcatcgggcgtgccgagccgtttcagcagcagcggtagcggtaccgacttcacgctgaccatcagctcgttgcagccagaggactttgcgacgtactattgtgcgcaaaacttggaaattccgcgcaccttcggccagggtacgaaagttgagattaaaggtgccaccccaccggagactggtgcagaaaccgagtctccgggcgaaaccacgggcggtagcgcggagagcgaaccgcctggtgagggtcaagttcaattggttcagagcggtccgggtctggttcaaccgggcggcagcgtgcgcatttcttgtgcggccagcggttacacctttacgaactacggtatgaattgggtgaaacaagctccgggcaaaggtctggagtggatgggttggatcaatacctataccggtgaatccacttacgcggattcctttaagggccgtttcaccttcagcctggacacgagcgcgagcgctgcatatctgcaaatcaatagcctgcgtgccgaagataccgcggtgtactattgcgcgcgttttgcaatcaagggcgactattggggtcaaggcacgctgctgaccgtgagcagcggtggtggcggcagcgatatccaaatgacccaatccccatcctccctgtctgcaagcgttggtgatcgtgtgacgattacgtgccgtgcctcccaagatatccgtaactacctgaattggtatcagcagaaaccgggcaaggctccgaaattgctgatctactacaccagccgcctggagtcgggtgtgcctagccgcttcagcggcagcggttcgggtaccgactataccttgaccattagcagcctgcagccggaagatttcgcgacgtattactgccaacagggtaacacgctgccgtggacctttggccaaggtaccaaagtcgagattaagggtgcgaccccgccggaaaccggtgcggaaaccgagagcccgggtgaaacgactggcggctctgcagagagcgagccgccaggtgagggcgaagtccaactggtcgagtctggtggcggcctggtgcaaccgggtggcagcctgcgtctgagctgcgctgcgagcggctatagctttaccggttataccatgaactgggttcgccaggcaccgggtaagggtctggaatgggtggcgctgatcaatccgtacaaaggtgtgagcacttacaatcagaaattcaaagaccgtttcaccattagcgttgacaagagcaagaataccgcgtatctgcagatgaacagcttgcgcgccgaggatacggccgtttactactgtgcacgtagcggctattacggtgacagcgactggtactttgacgtctggggtcagggcacgctggtcaccgttagcagcggcaccgccgaagcagctagcgcctctggcctgtcaggtcgttctgataaccattccccactgggtctggctgggtctccaggtagcccagctggtagcccaacctctaccgaagaaggtacctctgaatccgctactccagaatccggtcctggtactagcactgagccaagcgaaggttctgctccaggctccccggcaggtagccctacctctaccgaagagggcactagcaccgaaccatctgagggttccgctcctggcacctccactgaaccgtccgaaggcagtgctccgggtacttccgaaagcgcaactccggaatccggccctggttctgagcctgctacttccggctctgaaactccaggtagcgagccagcgacttctggttctgaaactccaggttcaccggcgggtagcccgacgagcacggaggaaggtacctctgagtcggccactcctgagtccggtccgggcacgagcaccgagccgagcgagggttcagccccgggtaccagcacggagccgtccgagggtagcgcaccgggttctccggcgggctcccctacgtctacggaagagggtacgtccactgaacctagcgagggcagcgcgccaggcaccagcactgaaccgagcgaaggcagcgcacctggcactagcgagtctgcgactccggagagcggtccgggtacgagcacggaaccaagcgaaggcagcgccccaggtacctctgaatctgctaccccagaatctggcccgggttccgagccagctacctctggttctgaaaccccaggtacttccactgaaccaagcgaaggtagcgctcctggcacttctactgaaccatccgaaggttccgctcctggtacgtctgaaagcgctacccctgaaagcggcccaggcacctctgaaagcgctactcctgagagcggtccaggctctccagcaggttctccaacctccactgaagaaggcacctctgagtctgctacccctgaatctggtcctggctccgaacctgctacctctggttccgaaactccaggtacctcggaatctgcgactccggaatctggcccgggcacgagcacggagccgtctgagggtagcgcaccaggtaccagcactgagccttctgagggctctgcaccgggtacctccacggaaccttcggaaggttctgcgccgggtacctccactgagccatccgagggttcagcaccaggtactagcacggaaccgtccgagggctctgcaccaggtacgagcaccgaaccgtcggagggtagcgctccaggtagcccagcgggctctccgacaagcaccgaagaaggcaccagcaccgagccgtccgaaggttccgcaccaggtacaagcgagagcgcgactcctgaatctggtccgggtagcgagcctgcaaccagcggttctgagacgccgggcacttccgaatctgcgaccccggagtccggtccaggttcagagccggcgacgagcggttcggaaacgccgggtacgtctgaatcagccacgccggagtctggtccgggtacctcgaccgaaccaagcgaaggttcggcaccgggtactagcgagagcgcaacccctgaaagcggtccgggcagcccggcaggttctccaaccagcaccgaagaaggttcccctgctggtagcccgacctctacggaggaaggtagccctgcaggttccccaacttctactgaggaaggtacttctgagtccgctaccccagaaagcggtcctggtacctccactgaaccgtctgaaggctctgcaccaggcacttctgagtctgctactccagaaagcggcccaggttctgaaccagcaacttctggctctgagactccaggcacttctgagtccgcaacgcctgaatccggtcctggttctgaaccagctacttccggcagcgaaaccccaggtacctctgagtctgcgactccagagtctggtcctggtacttccactgagcctagcgagggttccgcaccaggttctccggctggtagcccgaccagcacggaggagggtacgtctgaatctgcaacgccggaatcgggcccaggttcggagcctgcaacgtctggcagcgaaaccccgggtacctccgaatctgctacaccggaaagcggtcctggcagccctgctggttctccaacctctaccgaggagggttcaccggcaggtagcccgactagcactgaagaaggtactagcacggagccgagcgagggtagtgctccgggtacgagcgagagcgcaacgccagagagcggtccaggcaccagcgaatcggccacccctgagagcggcccaggtacttctgagagcgccactcctgaatccggccctggtagcgagccggcaacctccggctcagaaactcctggttcggaaccagcgaccagcggttctgaaactccgggtagcccggcaggcagcccaacgagcaccgaagagggtaccagcacggaaccgagcgagggttctgccccgggtacttccaccgaaccatcggagggctctgcacctggtagcgaacctgcgacgtctggttctgaaacgccgggtaccagcgaaagcgctaccccagaatccggtccgggcactagcaccgagccatcggagggctccgcaccaggtcaccatcatcaccatcac

SEQ ID NO: 834 - DNA, 4260 bp, Artificial Sequence
  Description of Artificial Sequence: Synthetic polynucleotide
gatatccagatgacccagagcccttcttccctgtccgcatccgtcggcgatcgtgtcacgattacctgtcgcagcactaagagcctgctgcactcaaacggtatcacgtacctgtactggtaccagcagaagccgggcaaagcgccgaagctgctgatttatcagatgagcaacctggcatcgggcgtgccgagccgtttcagcagcagcggtagcggtaccgacttcacgctgaccatcagctcgttgcagccagaggactttgcgacgtactattgtgcgcaaaacttggaaattccgcgcaccttcggccagggtacgaaagttgagattaaaggtgccaccccaccggagactggtgcagaaaccgagtctccgggcgaaaccacgggcggtagcgcggagagcgaaccgcctggtgagggtcaagttcaattggttcagagcggtccgggtctggttcaaccgggcggcagcgtgcgcatttcttgtgcggccagcggttacacctttacgaactacggtatgaattgggtgaaacaagctccgggcaaaggtctggagtggatgggttggatcaatacctataccggtgaatccacttacgcggattcctttaagggccgtttcaccttcagcctggacacgagcgcgagcgctgcatatctgcaaatcaatagcctgcgtgccgaagataccgcggtgtactattgcgcgcgttttgcaatcaagggcgactattggggtcaaggcacgctgctgaccgtgtcctcaggtggtggcggcagcgatatccaaatgacccaatccccatcctccctgtctgcaagcgttggtgatcgtgtgacgattacgtgccgtgcctcccaagatatccgtaactacctgaattggtatcagcagaaaccgggcaaggctccgaaattgctgatctactacaccagccgcctggagtcgggtgtgcctagccgcttcagcggcagcggttcgggtaccgactataccttgaccattagcagcctgcagccggaagatttcgcgacgtattactgccaacagggtaacacgctgccgtggacctttggccaaggtaccaaagtcgagattaagggtgcgaccccgccggaaaccggtgcggaaaccgagagcccgggtgaaacgactggcggctctgcagagagcgagccgccaggtgagggcgaagtccaactggtcgagtctggtggcggcctggtgcaaccgggtggcagcctgcgtctgagctgcgctgcgagcggctatagctttaccggttataccatgaactgggttcgccaggcaccgggtaagggtctggaatgggtggcgctgatcaatccgtacaaaggtgtgagcacttacaatcagaaattcaaagaccgtttcaccattagcgttgacaagagcaagaataccgcgtatctgcagatgaacagcttgcgcgccgaggatacggccgtttactactgtgcacgtagcggctattacggtgacagcgactggtactttgacgtctggggtcagggcacgctggtcaccgttagcagcggcaccgccgaagcagctagcgcctctggcctgtcaggtcgttctgataaccattccccactgggtctggctgggtctccaggtagcccagctggtagcccaacctctaccgaagaaggtacctctgaatccgctactccagaatccggtcctggtactagcactgagccaagcgaaggttctgctccaggctccccggcaggtagccctacctctaccgaagagggcactagcaccgaaccatctgagggttccgctcctggcacctccactgaaccgtccgaaggcagtgctccgggtacttccgaaagcgcaactccggaatccggccctggttctgagcctgctacttccggctctgaaactccaggtagcgagccagcgacttctggttctgaaactccaggttcaccggcgggtagcccgacgagcacggaggaaggtacctctgagtcggccactcctgagtccggtccgggcacgagcaccgagccgagcgagggttcagccccgggtaccagcacggagccgtccgagggtagcgcaccgggttctccggcgggctcccctacgtctacggaagagggtacgtccactgaacctagcgagggcagcgcgccaggcaccagcactgaaccgagcgaaggcagcgcacctggcactagcgagtctgcgactccggagagcggtccgggtacgagcacggaaccaagcgaaggcagcgccccaggtacctctgaatctgctaccccagaatctggcccgggttccgagccagctacctctggttctgaaaccccaggtacttccactgaaccaagcgaaggtagcgctcctggcacttctactgaaccatccgaaggttccgctcctggtacgtctgaaagcgctacccctgaaagcggcccaggcacctctgaaagcgctactcctgagagcggtccaggctctccagcaggttctccaacctccactgaagaaggcacctctgagtctgctacccctgaatctggtcctggctccgaacctgctacctctggttccgaaactccaggtacctcggaatctgcgactccggaatctggcccgggcacgagcacggagccgtctgagggtagcgcaccaggtaccagcactgagccttctgagggctctgcaccgggtacctccacggaaccttcggaaggttctgcgccgggtacctccactgagccatccgagggttcagcaccaggtactagcacggaaccgtccgagggctctgcaccaggtacgagcaccgaaccgtcggagggtagcgctccaggtagcccagcgggctctccgacaagcaccgaagaaggcaccagcaccgagccgtccgaaggttccgcaccaggtacaagcgagagcgcgactcctgaatctggtccgggtagcgagcctgcaaccagcggttctgagacgccgggcacttccgaatctgcgaccccggagtccggtccaggttcagagccggcgacgagcggttcggaaacgccgggtacgtctgaatcagccacgccggagtctggtccgggtacctcgaccgaaccaagcgaaggttcggcaccgggtactagcgagagcgcaacccctgaaagcggtccgggcagcccggcaggttctccaaccagcaccgaagaaggttcccctgctggtagcccgacctctacggaggaaggtagccctgcaggttccccaacttctactgaggaaggtacttctgagtccgctaccccagaaagcggtcctggtacctccactgaaccgtctgaaggctctgcaccaggcacttctgagtctgctactccagaaagcggcccaggttctgaaccagcaacttctggctctgagactccaggcacttctgagtccgcaacgcctgaatccggtcctggttctgaaccagctacttccggcagcgaaaccccaggtacctctgagtctgcgactccagagtctggtcctggtacttccactgagcctagcgagggttccgcaccaggttctccggctggtagcccgaccagcacggaggagggtacgtctgaatctgcaacgccggaatcgggcccaggttcggagcctgcaacgtctggcagcgaaaccccgggtacctccgaatctgctacaccggaaagcggtcctggcagccctgctggttctccaacctctaccgaggagggttcaccggcaggtagcccgactagcactgaagaaggtactagcacggagccgagcgagggtagtgctccgggtacgagcgagagcgcaacgccagagagcggtccaggcaccagcgaatcggccacccctgagagcggcccaggtacttctgagagcgccactcctgaatccggccctggtagcgagccggcaacctccggctcagaaactcctggttcggaaccagcgaccagcggttctgaaactccgggtagcccggcaggcagcccaacgagcaccgaagagggtaccagcacggaaccgagcgagggttctgccccgggtacttccaccgaaccatcggagggctctgcacctggtagcgaacctgcgacgtctggttctgaaacgccgggtaccagcgaaagcgctaccccagaatccggtccgggcactagcaccgagccatcggagggctccgcaccaggtcaccatcatcaccatcac

SEQ ID NO: 835 - DNA, 4260 bp, Artificial Sequence
  Description of Artificial Sequence: Synthetic polynucleotide
gatatccagatgacccagagcccttcttccctgtccgcatccgtcggcgatcgtgtcacgattacctgtcgcagcactaagagcctgctgcactcaaacggtatcacgtacctgtactggtaccagcagaagccgggcaaagcgccgaagctgctgatttatcagatgagcaacctggcatcgggcgtgccgagccgtttcagcagcagcggtagcggtaccgacttcacgctgaccatcagctcgttgcagccagaggactttgcgacgtactattgtgcgcaaaacttggaaattccgcgcaccttcggccagggtacgaaagttgagattaaaggtgccaccccaccggagactggtgcagaaaccgagtctccgggcgaaaccacgggcggtagcgcggagagcgaaccgcctggtgagggtcaagttcaattggttcagagcggtccgggtctggttcaaccgggcggcagcgtgcgcatttcttgtgcggccagcggttacacctttacgaactacggtatgaattgggtgaaacaagctccgggcaaaggtctggagtggatgggttggatcaatacctataccggtgaatccacttacgcggattcctttaagggccgtttcaccttcagcctggacacgagcgcgagcgctgcatatctgcaaatcaatagcctgcgtgccgaagataccgcggtgtactattgcgcgcgttttgcaatcaagggcgactattggggtcaaggcacgctgctgaccgtgtcctcaggtggtggcggcagcgatatccaaatgacccaatccccatcctccctgtctgcaagcgttggtgatcgtgtgacgattacgtgccgtgcctcccaagatatccgtaactacctgaattggtatcagcagaaaccgggcaaggctccgaaattgctgatctactacaccagccgcctggagtcgggtgtgcctagccgcttcagcggcagcggttcgggtaccgactataccttgaccattagcagcctgcagccggaagatttcgcgacgtattactgccaacagggtaacacgctgccgtggacctttggccaaggtaccaaagtcgagattaagggtgcgaccccgccggaaaccggtgcggaaaccgagagcccgggtgaaacgactggcggctctgcagagagcgagccgccaggtgagggcgaagtccaactggtcgagtctggtggcggcctggtgcaaccgggtggcagcctgcgtctgagctgcgctgcgagcggctatagctttaccggttataccatgaactgggttcgccaggcaccgggtaagggtctggaatgggtggcgctgatcaatccgtacaaaggtgtgagcacttacaatcagaaattcaaagaccgtttcaccattagcgttgacaagagcaagaataccgcgtatctgcagatgaacagcttgcgcgccgaggatacggccgtttactactgtgcacgtagcggctattacggtgacagcgactggtactttgacgtctggggtcagggcacgctggtcaccgttagcagcggcaccgccgaagcagctagcgcctctggcgaatctggtcgtgcagctaacaccgctccagagggtctgactgggcctccaggtagcccagctggtagcccaacctctaccgaagaaggtacctctgaatccgctactccagaatccggtcctggtactagcactgagccaagcgaaggttctgctccaggctccccggcaggtagccctacctctaccgaagagggcactagcaccgaaccatctgagggttccgctcctggcacctccactgaaccgtccgaaggcagtgctccgggtacttccgaaagcgcaactccggaatccggccctggttctgagcctgctacttccggctctgaaactccaggtagcgagccagcgacttctggttctgaaactccaggttcaccggcgggtagcccgacgagcacggaggaaggtacctctgagtcggccactcctgagtccggtccgggcacgagcaccgagccgagcgagggttcagccccgggtaccagcacggagccgtccgagggtagcgcaccgggttctccggcgggctcccctacgtctacggaagagggtacgtccactgaacctagcgagggcagcgcgccaggcaccagcactgaaccgagcgaaggcagcgcacctggcactagcgagtctgcgactccggagagcggtccgggtacgagcacggaaccaagcgaaggcagcgccccaggtacctctgaatctgctaccccagaatctggcccgggttccgagccagctacctctggttctgaaaccccaggtacttccactgaaccaagcgaaggtagcgctcctggcacttctactgaaccatccgaaggttccgctcctggtacgtctgaaagcgctacccctgaaagcggcccaggcacctctgaaagcgctactcctgagagcggtccaggctctccagcaggttctccaacctccactgaagaaggcacctctgagtctgctacccctgaatctggtcctggctccgaacctgctacctctggttccgaaactccaggtacctcggaatctgcgactccggaatctggcccgggcacgagcacggagccgtctgagggtagcgcaccaggtaccagcactgagccttctgagggctctgcaccgggtacctccacggaaccttcggaaggttctgcgccgggtacctccactgagccatccgagggttcagcaccaggtactagcacggaaccgtccgagggctctgcaccaggtacgagcaccgaaccgtcggagggtagcgctccaggtagcccagcgggctctccgacaagcaccgaagaaggcaccagcaccgagccgtccgaaggttccgcaccaggtacaagcgagagcgcgactcctgaatctggtccgggtagcgagcctgcaaccagcggttctgagacgccgggcacttccgaatctgcgaccccggagtccggtccaggttcagagccggcgacgagcggttcggaaacgccgggtacgtctgaatcagccacgccggagtctggtccgggtacctcgaccgaaccaagcgaaggttcggcaccgggtactagcgagagcgcaacccctgaaagcggtccgggcagcccggcaggttctccaaccagcaccgaagaaggttcccctgctggtagcccgacctctacggaggaaggtagccctgcaggttccccaacttctactgaggaaggtacttctgagtccgctaccccagaaagcggtcctggtacctccactgaaccgtctgaaggctctgcaccaggcacttctgagtctgctactccagaaagcggcccaggttctgaaccagcaacttctggctctgagactccaggcacttctgagtccgcaacgcctgaatccggtcctggttctgaaccagctacttccggcagcgaaaccccaggtacctctgagtctgcgactccagagtctggtcctggtacttccactgagcctagcgagggttccgcaccaggttctccggctggtagcccgaccagcacggaggagggtacgtctgaatctgcaacgccggaatcgggcccaggttcggagcctgcaacgtctggcagcgaaaccccgggtacctccgaatctgctacaccggaaagcggtcctggcagccctgctggttctccaacctctaccgaggagggttcaccggcaggtagcccgactagcactgaagaaggtactagcacggagccgagcgagggtagtgctccgggtacgagcgagagcgcaacgccagagagcggtccaggcaccagcgaatcggccacccctgagagcggcccaggtacttctgagagcgccactcctgaatccggccctggtagcgagccggcaacctccggctcagaaactcctggttcggaaccagcgaccagcggttctgaaactccgggtagcccggcaggcagcccaacgagcaccgaagagggtaccagcacggaaccgagcgagggttctgccccgggtacttccaccgaaccatcggagggctctgcacctggtagcgaacctgcgacgtctggttctgaaacgccgggtaccagcgaaagcgctaccccagaatccggtccgggcactagcaccgagccatcggagggctccgcaccaggtcaccatcatcaccatcac

SEQ ID NO: 836 - DNA, 5229 bp, Artificial Sequence
  Description of Artificial Sequence: Synthetic polynucleotide
caccatcatcaccatcactccccagcaggcagcccgaccagcaccgaggagggtacgagcgagtcggctactccagagagcggtccgggtacctctacggaaccgtccgaaggtagcgctccaggcacgtctgaaagcgcgacgccggaaagcggtccaggcagcgagccggcgacctccggtagcgaaacgcctggtacctcggagtcagcgactccggaaagcggtccgggtagcgaacctgcaacgagcggtagcgagactccaggcactagcgaatccgcaactccggagtcgggtccgggcacctctacggagcctagcgagggctcagcaccaggtagccctgcaggttccccgacgtcaaccgaggaaggtacaagcgaaagcgccacccctgagtcgggccctggcagcgaaccggcaactagcggcagcgagactccgggtaccagcgagtctgctacgccagagagcggcccaggttcgccagcgggttcgccgactagcacggaggagggcagcccagcgggtagcccgaccagcactgaggagggtacgtccaccgaaccgagcgaaggtagcgcaccaggtacctccgagtctgccacccctgaatccggtccaggtaccagcgaatcagccaccccggagtcgggtccaggtacgagcgaatctgctaccccggaatccggcccaggcagcgaacctgctactagcggcagcgaaacgccgggcagcgaacctgccacgtcaggcagcgagacgccgggttcccctgcaggctccccgaccagcactgaggagggcacctccaccgaaccatcagaaggtagcgcgcctggtacgtcaaccgaaccttccgagggcagcgcaccgggtggctcagcgcctgaggcaggtcgttctgctaaccatacccctgcaggattaactggccccgccaccagcgggagcgagacccccgggactgatatccagatgacccaaagccctagttcattaagcgcatcggtgggtgaccgggtaaccattacctgtcaagcaagtcaggatatcagcaactacctgaactggtaccagcagaaacccggaaaagcgccgaaactgctgatctatgatgccagcaatctggaaacaggtgttcctagccgtttctctggatcaggttcaggaaccgattttacattcaccattagctcattacagccggaggatatcgcgacgtatttttgccagcacttcgatcatctgcctttagcatttggcggcggtactaaagtggagatcaaaggagcgacgccgcctgagactggagcagagaccgaatcacctggtgagacgacgggcgggtcagccgaaagcgagccaccgggggaagggcaggttcaattgcaagaaagtggaccgggcttagtcaaacccagcgaaaccctctccctgacctgcacagtcagcggagggtctgtgagctcaggcgactactattggacctggattagacaatcaccaggtaaaggtcttgagtggattggccacatctactatagcggtaacaccaactataatccgagcctgaaaagtcgtctgaccatcagcatcgacaccagcaaaacccagtttagcctgaaattaagcagcgttacagcagcggatacagcgatttactattgtgtccgtgatcgcgttactggcgcatttgatatttgggggcagggaacaatggttactgtgtcaagtggaggaggtggcagtgaactggttgttacacaagaaccgtccttaacagttagtccggggggcaccgtcacattaacatgtcgttcaagtacaggtgcagtaaccacgtccaactatgcaaattgggttcaacagaagcccggacaggccccgagaggtttaataggtggaacaaacaaaagagcacctggtacacctgcccggttctccggatcctctctcggcggttccgcagcattaaccttaagtggtgttcagccggaagatgaagcggagtattactgcgcactttggtatagcaacttatgggtgtttggaggcggtacaaaattgaccgttctgggtgcgacgccgcccgaaacgggcgcggagacggagtccccaggtgaaaccactggtggaagcgcagaatcagagccaccgggcgagggggaagtacaattacaggagtccggcggaggtctggttcagcctggtggtagcctcaaactgtcctgcgcagcaagcggttttacctttaacacctacgccatgaactgggtgcgtcaagctcctggtaaaggcttagaatgggttgcgcgtattcgtagcaaatacaacaactatgccacctattacgcggacagtgtaaaagaccgtttcaccatcagccgcgatgatagcaaaaatacagcctatctgcagatgaacaacctgaagaccgaagacacggccgtctactactgcgtgcgtcatggcaattttggcaacagctatgttagctggttcgcgtattggggccagggaacactggtcacggtttcctcagggactgctgaggcggctagcgcctccggagaagctggaagaagcgccaatcacacaccagctggacttacaggcccgcctggtagccccgcggggagccctacaagcactgaggagggcacatctgagtccgctacccctgagagtggacccgggacaagcactgagcctagcgaaggaagcgcaccaggttcccccgctgggagccccacaagcacagaagagggaacttctaccgagccctctgagggctcagcccctggaactagcacagagccctccgaaggcagtgcaccgggtacttccgaaagcgcaactccggaatccggccctggttctgagcctgctacttccggctctgaaactccaggtagcgagccagcgacttctggttctgaaactccaggttcaccggcgggtagcccgacgagcacggaggaaggtacctctgagtcggccactcctgagtccggtccgggcacgagcaccgagccgagcgagggttcagccccgggtaccagcacggagccgtccgagggtagcgcaccgggttctccggcgggctcccctacgtctacggaagagggtacgtccactgaacctagcgagggcagcgcgccaggcaccagcactgaaccgagcgaaggcagcgcacctggcactagcgagtctgcgactccggagagcggtccgggtacgagcacggaaccaagcgaaggcagcgccccaggtacctctgaatctgctaccccagaatctggcccgggttccgagccagctacctctggttctgaaaccccaggtacttccactgaaccaagcgaaggtagcgctcctggcacttctactgaaccatccgaaggttccgctcctggtacgtctgaaagcgctacccctgaaagcggcccaggcacctctgaaagcgctactcctgagagcggtccaggctctccagcaggttctccaacctccactgaagaaggcacctctgagtctgctacccctgaatctggtcctggctccgaacctgctacctctggttccgaaactccaggtacctcggaatctgcgactccggaatctggcccgggcacgagcacggagccgtctgagggtagcgcaccaggtaccagcactgagccttctgagggctctgcaccgggtacctccacggaaccttcggaaggttctgcgccgggtacctccactgagccatccgagggttcagcaccaggtactagcacggaaccgtccgagggctctgcaccaggtacgagcaccgaaccgtcggagggtagcgctccaggtagcccagcgggctctccgacaagcaccgaagaaggcaccagcaccgagccgtccgaaggttccgcaccaggtacaagcgagagcgcgactcctgaatctggtccgggtagcgagcctgcaaccagcggttctgagacgccgggcacttccgaatctgcgaccccggagtccggtccaggttcagagccggcgacgagcggttcggaaacgccgggtacgtctgaatcagccacgccggagtctggtccgggtacctcgaccgaaccaagcgaaggttcggcaccgggtactagcgagagcgcaacccctgaaagcggtccgggcagcccggcaggttctccaaccagcaccgaagaaggttcccctgctggtagcccgacctctacggaggaaggtagccctgcaggttccccaacttctactgaggaaggtacttctgagtccgctaccccagaaagcggtcctggtacctccactgaaccgtctgaaggctctgcaccaggcacttctgagtctgctactccagaaagcggcccaggttctgaaccagcaacttctggctctgagactccaggcacttctgagtccgcaacgcctgaatccggtcctggttctgaaccagctacttccggcagcgaaaccccaggtacctctgagtctgcgactccagagtctggtcctggtacttccactgagcctagcgagggttccgcaccaggttctccggctggtagcccgaccagcacggaggagggtacgtctgaatctgcaacgccggaatcgggcccaggttcggagcctgcaacgtctggcagcgaaaccccgggtacctccgaatctgctacaccggaaagcggtcctggcagccctgctggttctccaacctctaccgaggagggttcaccggcaggtagcccgactagcactgaagaaggtactagcacggagccgagcgagggtagtgctccgggtacgagcgagagcgcaacgccagagagcggtccaggcaccagcgaatcggccacccctgagagcggcccaggtacttctgagagcgccactcctgaatccggccctggtagcgagccggcaacctccggctcagaaactcctggttcggaaccagcgaccagcggttctgaaactccgggtagcccggcaggcagcccaacgagcaccgaagagggtaccagcacggaaccgagcgagggttctgccccgggtacttccaccgaaccatcggagggctctgcacctggtagcgaacctgcgacgtctggttctgaaacgccgggtaccagcgaaagcgctaccccagaatccggtccgggcactagcaccgagccatcggagggcgccgcagaaccagaggcg

SEQ ID NO: 837 - DNA, 5247 bp, Artificial Sequence
  Description of Artificial Sequence: Synthetic polynucleotide
caccatcatcaccatcactccccagcaggcagcccgaccagcaccgaggagggtacgagcgagtcggctactccagagagcggtccgggtacctctacggaaccgtccgaaggtagcgctccaggcacgtctgaaagcgcgacgccggaaagcggtccaggcagcgagccggcgacctccggtagcgaaacgcctggtacctcggagtcagcgactccggaaagcggtccgggtagcgaacctgcaacgagcggtagcgagactccaggcactagcgaatccgcaactccggagtcgggtccgggcacctctacggagcctagcgagggctcagcaccaggtagccctgcaggttccccgacgtcaaccgaggaaggtacaagcgaaagcgccacccctgagtcgggccctggcagcgaaccggcaactagcggcagcgagactccgggtaccagcgagtctgctacgccagagagcggcccaggttcgccagcgggttcgccgactagcacggaggagggcagcccagcgggtagcccgaccagcactgaggagggtacgtccaccgaaccgagcgaaggtagcgcaccaggtacctccgagtctgccacccctgaatccggtccaggtaccagcgaatcagccaccccggagtcgggtccaggtacgagcgaatctgctaccccggaatccggcccaggcagcgaacctgctactagcggcagcgaaacgccgggcagcgaacctgccacgtcaggcagcgagacgccgggttcccctgcaggctccccgaccagcactgaggagggcacctccaccgaaccatcagaaggtagcgcgcctggtacgtcaaccgaaccttccgagggcagcgcaccgggtggctcagcgcctactacaggggaggcgggggaagcagcaggggcgacttctgctggggctaccggccccgctacctcaggctccgaaaccccgggcaccgacatccaaatgacccagagcccgagcagcctgagcgcgagcgtgggcgaccgtgttaccatcacctgccaagcgagccaagacatcagcaactacctgaactggtatcagcaaaagccgggcaaagcgccgaagctgctgatctacgacgcgagcaacctggaaaccggtgtgccgagccgtttcagcggtagcggtagcggtaccgatttcacctttaccatcagcagcctgcaaccggaggacatcgcgacctatttctgccagcactttgatcacctgccgctggcgtttggtggcggtaccaaagttgagattaaaggtgcaacgcctccggagactggtgctgaaactgagtccccgggcgagacgaccggtggctctgctgaatccgaaccaccgggcgaaggccaggtgcaactgcaggaaagcggtccgggcctggttaaaccgagcgaaaccctgagcctgacctgcaccgtgagcggcggtagcgttagcagcggtgactactattggacctggatccgtcaaagcccgggtaaaggcctggagtggatcggtcacatttactatagcggcaacaccaactacaacccgagcctgaagagccgtctgaccatcagcattgacaccagcaaaacccagttcagcctgaaactgagcagcgtgaccgcggcggataccgcgatttactattgcgttcgtgatcgtgttaccggcgcgttcgacatctggggtcagggcaccatggttaccgttagcagcggtggtggcggcagcgagttagttgtgacccaagagccgagcctgaccgttagcccgggtggtacggtcaccctgacgtgccgtagcagcaccggtgcggtcacgaccagcaactatgccaattgggtccagcagaaaccgggtcaagcaccgcgtggcctgatcggcggcaccaataaacgtgccccgggtactcctgcgcgtttctccggtagcctgctgggcggcaaagccgctctgaccctgagcggtgtccagccggaagatgaagcggagtactactgcgcgctgtggtattccaatctgtgggtttttggcggcggtaccaagctgaccgtattgggtgctacgccaccggagactggcgcagaaacggaaagcccgggtgagactacgggtggctctgcggagagcgaacctccgggtgagggtgaggtccaactgctggagtctggtggtggcctggttcaaccgggtggctcgttgaagctgagctgtgcagctagcggctttaccttcaacacctatgcgatgaattgggttcgtcaggcaccgggtaagggcctggaatgggtggcgcgtatccgctccaagtacaacaactacgcgacctactacgcggatagcgttaaagaccgcttcacgattagccgtgacgattccaagaatacggcatatctgcaaatgaacaatctgaaaaccgaagataccgcggtgtattactgtgtgcgccacggcaatttcggcaacagctacgtgagctggtttgcatattggggtcagggcaccctggttacggtgagctccggcaccgccgaagcagctagcgcctctggcacgactggtgaagccggagaggcagctggcgcgacctcagcgggggctactgggcctccaggtagcccagctggtagcccaacctctaccgaagaaggtacctctgaatccgctactccagaatccggtcctggtactagcactgagccaagcgaaggttctgctccaggctccccggcaggtagccctacctctaccgaagagggcactagcaccgaaccatctgagggttccgctcctggcacctccactgaaccgtccgaaggcagtgctccgggtacttccgaaagcgcaactccggaatccggccctggttctgagcctgctacttccggctctgaaactccaggtagcgagccagcgacttctggttctgaaactccaggttcaccggcgggtagcccgacgagcacggaggaaggtacctctgagtcggccactcctgagtccggtccgggcacgagcaccgagccgagcgagggttcagccccgggtaccagcacggagccgtccgagggtagcgcaccgggttctccggcgggctcccctacgtctacggaagagggtacgtccactgaacctagcgagggcagcgcgccaggcaccagcactgaaccgagcgaaggcagcgcacctggcactagcgagtctgcgactccggagagcggtccgggtacgagcacggaaccaagcgaaggcagcgccccaggtacctctgaatctgctaccccagaatctggcccgggttccgagccagctacctctggttctgaaaccccaggtacttccactgaaccaagcgaaggtagcgctcctggcacttctactgaaccatccgaaggttccgctcctggtacgtctgaaagcgctacccctgaaagcggcccaggcacctctgaaagcgctactcctgagagcggtccaggctctccagcaggttctccaacctccactgaagaaggcacctctgagtctgctacccctgaatctggtcctggctccgaacctgctacctctggttccgaaactccaggtacctcggaatctgcgactccggaatctggcccgggcacgagcacggagccgtctgagggtagcgcaccaggtaccagcactgagccttctgagggctctgcaccgggtacctccacggaaccttcggaaggttctgcgccgggtacctccactgagccatccgagggttcagcaccaggtactagcacggaaccgtccgagggctctgcaccaggtacgagcaccgaaccgtcggagggtagcgctccaggtagcccagcgggctctccgacaagcaccgaagaaggcaccagcaccgagccgtccgaaggttccgcaccaggtacaagcgagagcgcgactcctgaatctggtccgggtagcgagcctgcaaccagcggttctgagacgccgggcacttccgaatctgcgaccccggagtccggtccaggttcagagccggcgacgagcggttcggaaacgccgggtacgtctgaatcagccacgccggagtctggtccgggtacctcgaccgaaccaagcgaaggttcggcaccgggtactagcgagagcgcaacccctgaaagcggtccgggcagcccggcaggttctccaaccagcaccgaagaaggttcccctgctggtagcccgacctctacggaggaaggtagccctgcaggttccccaacttctactgaggaaggtacttctgagtccgctaccccagaaagcggtcctggtacctccactgaaccgtctgaaggctctgcaccaggcacttctgagtctgctactccagaaagcggcccaggttctgaaccagcaacttctggctctgagactccaggcacttctgagtccgcaacgcctgaatccggtcctggttctgaaccagctacttccggcagcgaaaccccaggtacctctgagtctgcgactccagagtctggtcctggtacttccactgagcctagcgagggttccgcaccaggttctccggctggtagcccgaccagcacggaggagggtacgtctgaatctgcaacgccggaatcgggcccaggttcggagcctgcaacgtctggcagcgaaaccccgggtacctccgaatctgctacaccggaaagcggtcctggcagccctgctggttctccaacctctaccgaggagggttcaccggcaggtagcccgactagcactgaagaaggtactagcacggagccgagcgagggtagtgctccgggtacgagcgagagcgcaacgccagagagcggtccaggcaccagcgaatcggccacccctgagagcggcccaggtacttctgagagcgccactcctgaatccggccctggtagcgagccggcaacctccggctcagaaactcctggttcggaaccagcgaccagcggttctgaaactccgggtagcccggcaggcagcccaacgagcaccgaagagggtaccagcacggaaccgagcgagggttctgccccgggtacttccaccgaaccatcggagggctctgcacctggtagcgaacctgcgacgtctggttctgaaacgccgggtaccagcgaaagcgctaccccagaatccggtccgggcactagcaccgagccatcggagggcgccgcagaaccagaggcg

SEQ ID NO: 838 - DNA, 4269 bp, Artificial Sequence
  Description of Artificial Sequence: Synthetic polynucleotide
gacattcagatgactcagtctccgtcctccctgtctgcgagcgtgggcgaccgtgtgactattacctgtaaagcctcccaggacgtgtctatcggtgtggcatggtatcaacaaaagccgggtaaggcacctaaactgctgatctactccgcttcttaccgttacacgggcgttccgtcccgttttagcggttccggtagcggtactgattttaccctgactatttcctccctgcaaccagaagactttgcgacctattactgtcagcaatactatatttacccgtataccttcggccagggcactaaggttgaaattaaaggtgcaacgcctccggagactggtgctgaaactgagtccccgggcgagacgaccggtggctctgctgaatccgaaccaccgggcgaaggcgaggttcagctggtggagtctggcggcggtctggtacagccgggtggtagcctgcgtctgagctgcgcggcgtccggtttcactttcaccgattataccatggactgggttcgccaggcaccgggcaagggtctggaatgggtggcggacgtgaacccgaactccggtggttctatctacaaccagcgtttcaaaggtcgtttcacgctgagcgtagatcgtagcaaaaacactctgtacctgcagatgaactccctgcgcgcagaagacaccgcggtgtattactgtgcacgtaacctgggcccgtccttctatttcgactattggggccagggcactctggttaccgttagctccggtggtggcggcagcgaactggtcgtcacgcaggagccgtcccttaccgtttcaccaggtggaacagtgactctgacgtgtcgctcctccactggggcggttacaacttccaattatgctaattgggtccagcagaagccgggccaagcccctcgcgggttgattggcggcaccaacaaacgtgctccagggacacctgcccgtttttcgggctccttattggggggcaaagctgcactgacgttgtctggagttcagccggaggatgaggcagagtattactgcgcattgtggtattctaatttatgggtttttggaggcggcacaaagctgaccgtcctgggtgcgaccccgccggaaaccggtgcggaaaccgaaagcccgggtgaaaccaccggtggcagcgcggagagcgaaccgccgggtgaaggtgaggttcagttgttggaaagcgggggcgggcttgtccaacctggaggttcattaaaattgagctgtgcagcctccggattcacctttaacacgtatgcaatgaactgggtccgtcaagcgcccggtaaggggctggagtgggtagctcgcatccgctcgaagtataataattacgcaacctactacgcagacagtgtcaaagatcgcttcactatctcacgcgacgacagtaagaacacggcctacttacagatgaacaatcttaaaacggaggacaccgctgtctactactgcgtgcgccacgggaatttcggtaactcttatgtaagttggttcgcatattggggacaaggtacgttggtaaccgtatccagcggcaccgccgaagcagctagcgcctctggcctgtcaggtcgttctgataaccattccccactgggtctggctgggtctccaggtagcccagctggtagcccaacctctaccgaagaaggtacctctgaatccgctactccagaatccggtcctggtactagcactgagccaagcgaaggttctgctccaggctccccggcaggtagccctacctctaccgaagagggcactagcaccgaaccatctgagggttccgctcctggcacctccactgaaccgtccgaaggcagtgctccgggtacttccgaaagcgcaactccggaatccggccctggttctgagcctgctacttccggctctgaaactccaggtagcgagccagcgacttctggttctgaaactccaggttcaccggcgggtagcccgacgagcacggaggaaggtacctctgagtcggccactcctgagtccggtccgggcacgagcaccgagccgagcgagggttcagccccgggtaccagcacggagccgtccgagggtagcgcaccgggttctccggcgggctcccctacgtctacggaagagggtacgtccactgaacctagcgagggcagcgcgccaggcaccagcactgaaccgagcgaaggcagcgcacctggcactagcgagtctgcgactccggagagcggtccgggtacgagcacggaaccaagcgaaggcagcgccccaggtacctctgaatctgctaccccagaatctggcccgggttccgagccagctacctctggttctgaaaccccaggtacttccactgaaccaagcgaaggtagcgctcctggcacttctactgaaccatccgaaggttccgctcctggtacgtctgaaagcgctacccctgaaagcggcccaggcacctctgaaagcgctactcctgagagcggtccaggctctccagcaggttctccaacctccactgaagaaggcacctctgagtctgctacccctgaatctggtcctggctccgaacctgctacctctggttccgaaactccaggtacctcggaatctgcgactccggaatctggcccgggcacgagcacggagccgtctgagggtagcgcaccaggtaccagcactgagccttctgagggctctgcaccgggtacctccacggaaccttcggaaggttctgcgccgggtacctccactgagccatccgagggttcagcaccaggtactagcacggaaccgtccgagggctctgcaccaggtacgagcaccgaaccgtcggagggtagcgctccaggtagcccagcgggctctccgacaagcaccgaagaaggcaccagcaccgagccgtccgaaggttccgcaccaggtacaagcgagagcgcgactcctgaatctggtccgggtagcgagcctgcaaccagcggttctgagacgccgggcacttccgaatctgcgaccccggagtccggtccaggttcagagccggcgacgagcggttcggaaacgccgggtacgtctgaatcagccacgccggagtctggtccgggtacctcgaccgaaccaagcgaaggttcggcaccgggtactagcgagagcgcaacccctgaaagcggtccgggcagcccggcaggttctccaaccagcaccgaagaaggttcccctgctggtagcccgacctctacggaggaaggtagccctgcaggttccccaacttctactgaggaaggtacttctgagtccgctaccccagaaagcggtcctggtacctccactgaaccgtctgaaggctctgcaccaggcacttctgagtctgctactccagaaagcggcccaggttctgaaccagcaacttctggctctgagactccaggcacttctgagtccgcaacgcctgaatccggtcctggttctgaaccagctacttccggcagcgaaaccccaggtacctctgagtctgcgactccagagtctggtcctggtacttccactgagcctagcgagggttccgcaccaggttctccggctggtagcccgaccagcacggaggagggtacgtctgaatctgcaacgccggaatcgggcccaggttcggagcctgcaacgtctggcagcgaaaccccgggtacctccgaatctgctacaccggaaagcggtcctggcagccctgctggttctccaacctctaccgaggagggttcaccggcaggtagcccgactagcactgaagaaggtactagcacggagccgagcgagggtagtgctccgggtacgagcgagagcgcaacgccagagagcggtccaggcaccagcgaatcggccacccctgagagcggcccaggtacttctgagagcgccactcctgaatccggccctggtagcgagccggcaacctccggctcagaaactcctggttcggaaccagcgaccagcggttctgaaactccgggtagcccggcaggcagcccaacgagcaccgaagagggtaccagcacggaaccgagcgagggttctgccccgggtacttccaccgaaccatcggagggctctgcacctggtagcgaacctgcgacgtctggttctgaaacgccgggtaccagcgaaagcgctaccccagaatccggtccgggcactagcaccgagccatcggagggctccgcaccaggtcaccatcatcaccatcac

SEQ ID NO: 839 - DNA, 4266 bp, Artificial Sequence; identical to SEQ ID NO: 805
  Description of Artificial Sequence: Synthetic polynucleotide

SEQ ID NO: 840 - DNA, 5229 bp, Artificial Sequence
  Description of Artificial Sequence: Synthetic polynucleotide
caccatcatcaccatcactccccagcaggcagcccgaccagcaccgaggagggtacgagcgagtcggctactccagagagcggtccgggtacctctacggaaccgtccgaaggtagcgctccaggcacgtctgaaagcgcgacgccggaaagcggtccaggcagcgagccggcgacctccggtagcgaaacgcctggtacctcggagtcagcgactccggaaagcggtccgggtagcgaacctgcaacgagcggtagcgagactccaggcactagcgaatccgcaactccggagtcgggtccgggcacctctacggagcctagcgagggctcagcaccaggtagccctgcaggttccccgacgtcaaccgaggaaggtacaagcgaaagcgccacccctgagtcgggccctggcagcgaaccggcaactagcggcagcgagactccgggtaccagcgagtctgctacgccagagagcggcccaggttcgccagcgggttcgccgactagcacggaggagggcagcccagcgggtagcccgaccagcactgaggagggtacgtccaccgaaccgagcgaaggtagcgcaccaggtacctccgagtctgccacccctgaatccggtccaggtaccagcgaatcagccaccccggagtcgggtccaggtacgagcgaatctgctaccccggaatccggcccaggcagcgaacctgctactagcggcagcgaaacgccgggcagcgaacctgccacgtcaggcagcgagacgccgggttcccctgcaggctccccgaccagcactgaggagggcacctccaccgaaccatcagaaggtagcgcgcctggtacgtcaaccgaaccttccgagggcagcgcaccgggtggctcagcgcctgaggcaggtcgttctgctaaccatacccctgcaggattaactggccccgccaccagcgggagcgagacccccgggactgacattcagatgactcagtctccgtcctccctgtctgcgagcgtgggcgaccgtgtgactattacctgtaaagcctcccaggacgtgtctatcggtgtggcatggtatcaacaaaagccgggtaaggcacctaaactgctgatctactccgcttcttaccgttacacgggcgttccgtcccgttttagcggttccggtagcggtactgattttaccctgactatttcctccctgcaaccagaagactttgcgacctattactgtcagcaatactatatttacccgtataccttcggccagggcactaaggttgaaattaaaggtgcaacgcctccggagactggtgctgaaactgagtccccgggcgagacgaccggtggctctgctgaatccgaaccaccgggcgaaggcgaggttcagctggtggagtctggcggcggtctggtacagccgggtggtagcctgcgtctgagctgcgcggcgtccggtttcactttcaccgattataccatggactgggttcgccaggcaccgggcaagggtctggaatgggtggcggacgtgaacccgaactccggtggttctatctacaaccagcgtttcaaaggtcgtttcacgctgagcgtagatcgtagcaaaaacactctgtacctgcagatgaactccctgcgcgcagaagacaccgcggtgtattactgtgcacgtaacctgggcccgtccttctatttcgactactggggtcaaggtactctggtaactgtttcctctggtggtggcggcagcgagttagttgtgacccaagagccgagcctgaccgttagcccgggtggtacggtcaccctgacgtgccgtagcagcaacggtgcggtcacgagcagcaactatgccaattgggtccagcagaaaccgggtcaagcaccgcgtggcctgatcggcggcaccaataaacgtgccccgggtactcctgcgcgtttctccggtagcctgctgggcggcaaagccgctctgaccctgagcggtgtccagccggaagatgaagcggtgtactactgcgcgctgtggtatccgaatctgtgggtttttggcggcggtaccaagctgaccgtattgggtgctacgccaccggagactggcgcagaaacggaaagcccgggtgagactacgggtggctctgcggagagcgaacctccgggtgagggtgaggtccaactgctggagtctggtggtggcattgttcaaccgggtggctcgttgaagctgagctgtgcagctagcggctttaccttcaacacctatgcgatgaattgggttcgtcaggcaccgggtaagggcctggaatgggtggcgcgtatccgctccaagtacaacaactacgcgacctactacgcggatagcgttaaagaccgcttcacgattagccgtgacgattccaagaatacggtgtatctgcaaatgaacaatctgaaaaccgaagataccgcggtgtattactgtgtgcgccacgaaaatttcggcaacagctacgtgagctggtttgcacattggggtcagggcaccctggttacggtgagctccgggactgctgaggcggctagcgcctgtggagaagctggaagaagcgccaatcacacaccagctggacttacaggcccgcctggtagccccgcggggagccctacaagcactgaggagggcacatctgagtccgctacccctgagagtggacccgggacaagcactgagcctagcgaaggaagcgcaccaggttcccccgctgggagccccacaagcacagaagagggaacttctaccgagccctctgagggctcagcccctggaactagcacagagccctccgaaggcagtgcaccgggtacttccgaaagcgcaactccggaatccggccctggttctgagcctgctacttccggctctgaaactccaggtagcgagccagcgacttctggttctgaaactccaggttcaccggcgggtagcccgacgagcacggaggaaggtacctctgagtcggccactcctgagtccggtccgggcacgagcaccgagccgagcgagggttcagccccgggtaccagcacggagccgtccgagggtagcgcaccgggttctccggcgggctcccctacgtctacggaagagggtacgtccactgaacctagcgagggcagcgcgccaggcaccagcactgaaccgagcgaaggcagcgcacctggcactagcgagtctgcgactccggagagcggtccgggtacgagcacggaaccaagcgaaggcagcgccccaggtacctctgaatctgctaccccagaatctggcccgggttccgagccagctacctctggttctgaaaccccaggtacttccactgaaccaagcgaaggtagcgctcctggcacttctactgaaccatccgaaggttccgctcctggtacgtctgaaagcgctacccctgaaagcggcccaggcacctctgaaagcgctactcctgagagcggtccaggctctccagcaggttctccaacctccactgaagaaggcacctctgagtctgctacccctgaatctggtcctggctccgaacctgctacctctggttccgaaactccaggtacctcggaatctgcgactccggaatctggcccgggcacgagcacggagccgtctgagggtagcgcaccaggtaccagcactgagccttctgagggctctgcaccgggtacctccacggaaccttcggaaggttctgcgccgggtacctccactgagccatccgagggttcagcaccaggtactagcacggaaccgtccgagggctctgcaccaggtacgagcaccgaaccgtcggagggtagcgctccaggtagcccagcgggctctccgacaagcaccgaagaaggcaccagcaccgagccgtccgaaggttccgcaccaggtacaagcgagagcgcgactcctgaatctggtccgggtagcgagcctgcaaccagcggttctgagacgccgggcacttccgaatctgcgaccccggagtccggtccaggttcagagccggcgacgagcggttcggaaacgccgggtacgtctgaatcagccacgccggagtctggtccgggtacctcgaccgaaccaagcgaaggttcggcaccgggtactagcgagagcgcaacccctgaaagcggtccgggcagcccggcaggttctccaaccagcaccgaagaaggttcccctgctggtagcccgacctctacggaggaaggtagccctgcaggttccccaacttctactgaggaaggtacttctgagtccgctaccccagaaagcggtcctggtacctccactgaaccgtctgaaggctctgcaccaggcacttctgagtctgctactccagaaagcggcccaggttctgaaccagcaacttctggctctgagactccaggcacttctgagtccgcaacgcctgaatccggtcctggttctgaaccagctacttccggcagcgaaaccccaggtacctctgagtctgcgactccagagtctggtcctggtacttccactgagcctagcgagggttccgcaccaggttctccggctggtagcccgaccagcacggaggagggtacgtctgaatctgcaacgccggaatcgggcccaggttcggagcctgcaacgtctggcagcgaaaccccgggtacctccgaatctgctacaccggaaagcggtcctggcagccctgctggttctccaacctctaccgaggagggttcaccggcaggtagcccgactagcactgaagaaggtactagcacggagccgagcgagggtagtgctccgggtacgagcgagagcgcaacgccagagagcggtccaggcaccagcgaatcggccacccctgagagcggcccaggtacttctgagagcgccactcctgaatccggccctggtagcgagccggcaacctccggctcagaaactcctggttcggaaccagcgaccagcggttctgaaactccgggtagcccggcaggcagcccaacgagcaccgaagagggtaccagcacggaaccgagcgagggttctgccccgggtacttccaccgaaccatcggagggctctgcacctggtagcgaacctgcgacgtctggttctgaaacgccgggtaccagcgaaagcgctaccccagaatccggtccgggcactagcaccgagccatcggagggcgccgcagaaccagaggcg

SEQ ID NO: 841 - protein, 1745 aa, Artificial Sequence
  Description of Artificial Sequence: Synthetic polypeptide
SPAGSPTSTEEGTSESATPESGPGTSTEPSEGSAPGTSESATPESGPGSEPATSGSETPGTSESATPESGPGSEPATSGSETPGTSESATPESGPGTSTEPSEGSAPGSPAGSPTSTEEGTSESATPESGPGSEPATSGSETPGTSESATPESGPGSPAGSPTSTEEGSPAGSPTSTEEGTSTEPSEGSAPGTSESATPESGPGTSESATPESGPGTSESATPESGPGSEPATSGSETPGSEPATSGSETPGSPAGSPTSTEEGTSTEPSEGSAPGTSTEPSEGSAPGGSAPTTGEAGEAAGATSAGATGPATSGSETPGTDIQMTQSPSSLSASVGDRVTITCRSTKSLLHSNGITYLYWYQQKPGKAPKLLIYQMSNLASGVPSRFSSSGSGTDFTLTISSLQPEDFATYYCAQNLEIPRTFGQGTKVEIKGATPPETGAETESPGETTGGSAESEPPGEGQVQLVQSGPGLVQPGGSVRISCAASGYTFTNYGMNWVKQAPGKGLEWMGWINTYTGESTYADSFKGRFTFSLDTSASAAYLQINSLRAEDTAVYYCARFAIKGDYWGQGTLLTVSSGGGGSDIQMTQSPSSLSASVGDRVTITCRASQDIRNYLNWYQQKPGKAPKLLIYYTSRLESGVPSRFSGSGSGTDYTLTISSLQPEDFATYYCQQGNTLPWTFGQGTKVEIKGATPPETGAETESPGETTGGSAESEPPGEGEVQLVESGGGLVQPGGSLRLSCAASGYSFTGYTMNWVRQAPGKGLEWVALINPYKGVSTYNQKFKDRFTISVDKSKNTAYLQMNSLRAEDTAVYYCARSGYYGDSDWYFDVWGQGTLVTVSSGTAEAASASGTTGEAGEAAGATSAGATGPSPGSPAGSPTSTEEGTSESATPESGPGTSTEPSEGSAPGSPAGSPTSTEEGTSTEPSEGSAPGTSTEPSEGSAPGTSESATPESGPGSEPATSGSETPGSEPATSGSETPGSPAGSPTSTEEGTSESATPESGPGTSTEPSEGSAPGTSTEPSEGSAPGSPAGSPTSTEEGTSTEPSEGSAPGTSTEPSEGSAPGTSESATPESGPGTSTEPSEGSAPGTSESATPESGPGSEPATSGSETPGTSTEPSEGSAPGTSTEPSEGSAPGTSESATPESGPGTSESATPESGPGSPAGSPTSTEEGTSESATPESGPGSEPATSGSETPGTSESATPESGPGTSTEPSEGSAPGTSTEPSEGSAPGTSTEPSEGSAPGTSTEPSEGSAPGTSTEPSEGSAPGTSTEPSEGSAPGSPAGSPTSTEEGTSTEPSEGSAPGTSESATPESGPGSEPATSGSETPGTSESATPESGPGSEPATSGSETPGTSESATPESGPGTSTEPSEGSAPGTSESATPESGPGSPAGSPTSTEEGSPAGSPTSTEEGSPAGSPTSTEEGTSESATPESGPGTSTEPSEGSAPGTSESATPESGPGSEPATSGSETPGTSESATPESGPGSEPATSGSETPGTSESATPESGPGTSTEPSEGSAPGSPAGSPTSTEEGTSESATPESGPGSEPATSGSETPGTSESATPESGPGSPAGSPTSTEEGSPAGSPTSTEEGTSTEPSEGSAPGTSESATPESGPGTSESATPESGPGTSESATPESGPGSEPATSGSETPGSEPATSGSETPGSPAGSPTSTEEGTSTEPSEGSAPGTSTEPSEGSAPGSEPATSGSETPGTSESATPESGPGTSTEPSEGSAPGHHHHHH

SEQ ID NO: 842 - protein, 1421 aa, Artificial Sequence
  Description of Artificial Sequence: Synthetic polypeptide
DIQMTQSPSSLSASVGDRVTITCRSTKSLLHSNGITYLYWYQQKPGKAPKLLIYQMSNLASGVPSRFSSSGSGTDFTLTISSLQPEDFATYYCAQNLEIPRTFGQGTKVEIKGATPPETGAETESPGETTGGSAESEPPGEGQVQLVQSGPGLVQPGGSVRISCAASGYTFTNYGMNWVKQAPGKGLEWMGWINTYTGESTYADSFKGRFTFSLDTSASAAYLQINSLRAEDTAVYYCARFAIKGDYWGQGTLLTVSSGGGGSELVVTQEPSLTVSPGGTVTLTCRSSTGAVTTSNYANWVQQKPGQAPRGLIGGTNKRAPGTPARFSGSLLGGKAALTLSGVQPEDEAEYYCALWYSNLWVFGGGTKLTVLGATPPETGAETESPGETTGGSAESEPPGEGEVQLLESGGGLVQPGGSLKLSCAASGFTFNTYAMNWVRQAPGKGLEWVARIRSKYNNYATYYADSVKDRFTISRDDSKNTAYLQMNNLKTEDTAVYYCVRHGNFGNSYVSWFAYWGQGTLVTVSSGTAEAASASGEAGRSANHTPAGLTGPPGSPAGSPTSTEEGTSESATPESGPGTSTEPSEGSAPGSPAGSPTSTEEGTSTEPSEGSAPGTSTEPSEGSAPGTSESATPESGPGSEPATSGSETPGSEPATSGSETPGSPAGSPTSTEEGTSESATPESGPGTSTEPSEGSAPGTSTEPSEGSAPGSPAGSPTSTEEGTSTEPSEGSAPGTSTEPSEGSAPGTSESATPESGPGTSTEPSEGSAPGTSESATPESGPGSEPATSGSETPGTSTEPSEGSAPGTSTEPSEGSAPGTSESATPESGPGTSESATPESGPGSPAGSPTSTEEGTSESATPESGPGSEPATSGSETPGTSESATPESGPGTSTEPSEGSAPGTSTEPSEGSAPGTSTEPSEGSAPGTSTEPSEGSAPGTSTEPSEGSAPGTSTEPSEGSAPGSPAGSPTSTEEGTSTEPSEGSAPGTSESATPESGPGSEPATSGSETPGTSESATPESGPGSEPATSGSETPGTSESATPESGPGTSTEPSEGSAPGTSESATPESGPGSPAGSPTSTEEGSPAGSPTSTEEGSPAGSPTSTEEGTSESATPESGPGTSTEPSEGSAPGTSESATPESGPGSEPATSGSETPGTSESATPESGPGSEPATSGSETPGTSESATPESGPGTSTEPSEGSAPGSPAGSPTSTEEGTSESATPESGPGSEPATSGSETPGTSESATPESGPGSPAGSPTSTEEGSPAGSPTSTEEGTSTEPSEGSAPGTSESATPESGPGTSESATPESGPGTSESATPESGPGSEPATSGSETPGSEPATSGSETPGSPAGSPTSTEEGTSTEPSEGSAPGTSTEPSEGSAPGSEPATSGSETPGTSESATPESGPGTSTEPSEGAAEPEA

SEQ ID NO: 843 - protein, 1749 aa, Artificial Sequence
  Description of Artificial Sequence: Synthetic polypeptide
HHHHHHSPAGSPTSTEEGTSESATPESGPGTSTEPSEGSAPGTSESATPESGPGSEPATSGSETPGTSESATPESGPGSEPATSGSETPGTSESATPESGPGTSTEPSEGSAPGSPAGSPTSTEEGTSESATPESGPGSEPATSGSETPGTSESATPESGPGSPAGSPTSTEEGSPAGSPTSTEEGTSTEPSEGSAPGTSESATPESGPGTSESATPESGPGTSESATPESGPGSEPATSGSETPGSEPATSGSETPGSPAGSPTSTEEGTSTEPSEGSAPGTSTEPSEGSAPGGSAPTTGEAGEAAGATSAGATGPATSGSETPGTDIQMTQSPSSLSASVGDRVTITCKASQDVSIGVAWYQQKPGKAPKLLIYSASYRYTGVPSRFSGSGSGTDFTLTISSLQPEDFATYYCQQYYIYPYTFGQGTKVEIKGATPPETGAETESPGETTGGSAESEPPGEGEVQLVESGGGLVQPGGSLRLSCAASGFTFTDYTMDWVRQAPGKGLEWVADVNPNSGGSIYNQRFKGRFTLSVDRSKNTLYLQMNSLRAEDTAVYYCARNLGPSFYFDYWGQGTLVTVSSGGGGSELVVTQEPSLTVSPGGTVTLTCRSSNGAVTSSNYANWVQQKPGQAPRGLIGGTNKRAPGTPARFSGSLLGGKAALTLSGVQPEDEAVYYCALWYPNLWVFGGGTKLTVLGATPPETGAETESPGETTGGSAESEPPGEGEVQLLESGGGIVQPGGSLKLSCAASGFTFNTYAMNWVRQAPGKGLEWVARIRSKYNNYATYYADSVKDRFTISRDDSKNTVYLQMNNLKTEDTAVYYCVRHENFGNSYVSWFAHWGQGTLVTVSSGTAEAASASGTTGEAGEAAGATSAGATGPPGSPAGSPTSTEEGTSESATPESGPGTSTEPSEGSAPGSPAGSPTSTEEGTSTEPSEGSAPGTSTEPSEGSAPGTSESATPESGPGSEPATSGSETPGSEPATSGSETPGSPAGSPTSTEEGTSESATPESGPGTSTEPSEGSAPGTSTEPSEGSAPGSPAGSPTSTEEGTSTEPSEGSAPGTSTEPSEGSAPGTSESATPESGPGTSTEPSEGSAPGTSESATPESGPGSEPATSGSETPGTSTEPSEGSAPGTSTEPSEGSAPGTSESATPESGPGTSESATPESGPGSPAGSPTSTEEGTSESATPESGPGSEPATSGSETPGTSESATPESGPGTSTEPSEGSAPGTSTEPSEGSAPGTSTEPSEGSAPGTSTEPSEGSAPGTSTEPSEGSAPGTSTEPSEGSAPGSPAGSPTSTEEGTSTEPSEGSAPGTSESATPESGPGSEPATSGSETPGTSESATPESGPGSEPATSGSETPGTSESATPESGPGTSTEPSEGSAPGTSESATPESGPGSPAGSPTSTEEGSPAGSPTSTEEGSPAGSPTSTEEGTSESATPESGPGTSTEPSEGSAPGTSESATPESGPGSEPATSGSETPGTSESATPESGPGSEPATSGSETPGTSESATPESGPGTSTEPSEGSAPGSPAGSPTSTEEGTSESATPESGPGSEPATSGSETPGTSESATPESGPGSPAGSPTSTEEGSPAGSPTSTEEGTSTEPSEGSAPGTSESATPESGPGTSESATPESGPGTSESATPESGPGSEPATSGSETPGSEPATSGSETPGSPAGSPTSTEEGTSTEPSEGSAPGTSTEPSEGSAPGSEPATSGSETPGTSESATPESGPGTSTEPSEGAAEPEA

SEQ ID NO: 844 - protein, 1715 aa, Artificial Sequence
  Description of Artificial Sequence: Synthetic polypeptide
HHHHHHSPAGSPTSTEEGTSESATPESGPGTSTEPSEGSAPGTSESATPESGPGSEPATSGSETPGTSESATPESGPGSEPATSGSETPGTSESATPESGPGTSTEPSEGSAPGSPAGSPTSTEEGTSESATPESGPGSEPATSGSETPGTSESATPESGPGSPAGSPTSTEEGSPAGSPTSTEEGTSTEPSEGSAPGTSESATPESGPGTSESATPESGPGTSESATPESGPGSEPATSGSETPGSEPATSGSETPGSPAGSPTSTEEGTSTEPSEGSAPGTSTEPSEGSAPGGSAPTTGEAGEAAGATSAGATGPATSGSETPGTDIQMTQSPSSLPASLGDRVTINCQASQDISNYLNWYQQKPGKAPKLLIYYTNKLADGVPSRFSGSGSGRDSSFTISSLESEDIGSYYCQQYYNYPWTFGPGTKLEIKGGGGSDIQMTQSPSSLSASVGDRVTITCRSTKSLLHSNGITYLYWYQQKPGKAPKLLIYQMSNLASGVPSRFSSSGSGTDFTLTISSLQPEDFATYYCAQNLEIPRTFGQGTKVEIKGATPPETGAETESPGETTGGSAESEPPGEGQVQLVQSGPGLVQPGGSVRISCAASGYTFTNYGMNWVKQAPGKGLEWMGWINTYTGESTYADSFKGRFTFSLDTSASAAYLQINSLRAEDTAVYYCARFAIKGDYWGQGTLLTVSSGGGGSEVQLVESGGGLVQPGKSLKLSCEASGFTFSGYGMHWVRQAPGRGLESVAYITSSSINIKYADAVKGRFTVSRDNAKNLLFLQMNILKSEDTAMYYCARFDWDKNYWGQGTMVTVSSGTAEAASASGTTGEAGEAAGATSAGATGPPGSPAGSPTSTEEGTSESATPESGPGTSTEPSEGSAPGSPAGSPTSTEEGTSTEPSEGSAPGTSTEPSEGSAPGTSESATPESGPGSEPATSGSETPGSEPATSGSETPGSPAGSPTSTEEGTSESATPESGPGTSTEPSEGSAPGTSTEPSEGSAPGSPAGSPTSTEEGTSTEPSEGSAPGTSTEPSEGSAPGTSESATPESGPGTSTEPSEGSAPGTSESATPESGPGSEPATSGSETPGTSTEPSEGSAPGTSTEPSEGSAPGTSESATPESGPGTSESATPESGPGSPAGSPTSTEEGTSESATPESGPGSEPATSGSETPGTSESATPESGPGTSTEPSEGSAPGTSTEPSEGSAPGTSTEPSEGSAPGTSTEPSEGSAPGTSTEPSEGSAPGTSTEPSEGSAPGSPAGSPTSTEEGTSTEPSEGSAPGTSESATPESGPGSEPATSGSETPGTSESATPESGPGSEPATSGSETPGTSESATPESGPGTSTEPSEGSAPGTSESATPESGPGSPAGSPTSTEEGSPAGSPTSTEEGSPAGSPTSTEEGTSESATPESGPGTSTEPSEGSAPGTSESATPESGPGSEPATSGSETPGTSESATPESGPGSEPATSGSETPGTSESATPESGPGTSTEPSEGSAPGSPAGSPTSTEEGTSESATPESGPGSEPATSGSETPGTSESATPESGPGSPAGSPTSTEEGSPAGSPTSTEEGTSTEPSEGSAPGTSESATPESGPGTSESATPESGPGTSESATPESGPGSEPATSGSETPGSEPATSGSETPGSPAGSPTSTEEGTSTEPSEGSAPGTSTEPSEGSAPGSEPATSGSETPGTSESATPESGPGTSTEPSEGAAEPEA

SEQ ID NO: 845 - protein, 1718 aa, Artificial Sequence
  Description of Artificial Sequence: Synthetic polypeptide
HHHHHHSPAGSPTSTEEGTSESATPESGPGTSTEPSEGSAPGTSESATPESGPGSEPATSGSETPGTSESATPESGPGSEPATSGSETPGTSESATPESGPGTSTEPSEGSAPGSPAGSPTSTEEGTSESATPESGPGSEPATSGSETPGTSESATPESGPGSPAGSPTSTEEGSPAGSPTSTEEGTSTEPSEGSAPGTSESATPESGPGTSESATPESGPGTSESATPESGPGSEPATSGSETPGSEPATSGSETPGSPAGSPTSTEEGTSTEPSEGSAPGTSTEPSEGSAPGGSAPEAGRSANHTPAGLTGPATSGSETPGTELVVTQEPSLTVSPGGTVTLTCRSSTGAVTTSNYANWVQQKPGQAPRGLIGGTNKRAPGTPARFSGSLLGGKAALTLSGVQPEDEAEYYCALWYSNLWVFGGGTKLTVLGGGGSDIQMTQSPSSLSASVGDRVTITCQASQDISNYLNWYQQKPGKAPKLLIYDASNLETGVPSRFSGSGSGTDFTFTISSLQPEDIATYFCQHFDHLPLAFGGGTKVEIKGATPPETGAETESPGETTGGSAESEPPGEGQVQLQESGPGLVKPSETLSLTCTVSGGSVSSGDYYWTWIRQSPGKGLEWIGHIYYSGNTNYNPSLKSRLTISIDTSKTQFSLKLSSVTAADTAIYYCVRDRVTGAFDIWGQGTMVTVSSGGGGSEVQLLESGGGLVQPGGSLKLSCAASGFTFNTYAMNWVRQAPGKGLEWVARIRSKYNNYATYYADSVKDRFTISRDDSKNTAYLQMNNLKTEDTAVYYCVRHGNFGNSYVSWFAYWGQGTLVTVSSGTAEAASASGEAGRSANHTPAGLTGPPGSPAGSPTSTEEGTSESATPESGPGTSTEPSEGSAPGSPAGSPTSTEEGTSTEPSEGSAPGTSTEPSEGSAPGTSESATPESGPGSEPATSGSETPGSEPATSGSETPGSPAGSPTSTEEGTSESATPESGPGTSTEPSEGSAPGTSTEPSEGSAPGSPAGSPTSTEEGTSTEPSEGSAPGTSTEPSEGSAPGTSESATPESGPGTSTEPSEGSAPGTSESATPESGPGSEPATSGSETPGTSTEPSEGSAPGTSTEPSEGSAPGTSESATPESGPGTSESATPESGPGSPAGSPTSTEEGTSESATPESGPGSEPATSGSETPGTSESATPESGPGTSTEPSEGSAPGTSTEPSEGSAPGTSTEPSEGSAPGTSTEPSEGSAPGTSTEPSEGSAPGTSTEPSEGSAPGSPAGSPTSTEEGTSTEPSEGSAPGTSESATPESGPGSEPATSGSETPGTSESATPESGPGSEPATSGSETPGTSESATPESGPGTSTEPSEGSAPGTSESATPESGPGSPAGSPTSTEEGSPAGSPTSTEEGSPAGSPTSTEEGTSESATPESGPGTSTEPSEGSAPGTSESATPESGPGSEPATSGSETPGTSESATPESGPGSEPATSGSETPGTSESATPESGPGTSTEPSEGSAPGSPAGSPTSTEEGTSESATPESGPGSEPATSGSETPGTSESATPESGPGSPAGSPTSTEEGSPAGSPTSTEEGTSTEPSEGSAPGTSESATPESGPGTSESATPESGPGTSESATPESGPGSEPATSGSETPGSEPATSGSETPGSPAGSPTSTEEGTSTEPSEGSAPGTSTEPSEGSAPGSEPATSGSETPGTSESATPESGPGTSTEPSEGAAEPEA

SEQ ID NO: 846 - protein, 1422 aa, Artificial Sequence
  Description of Artificial Sequence: Synthetic polypeptide
DIQMTQSPSSLSASVGDRVTITCRSTKSLLHSNGITYLYWYQQKPGKAPKLLIYQMSNLASGVPSRFSSSGSGTDFTLTISSLQPEDFATYYCAQNLEIPRTFGQGTKVEIKGATPPETGAETESPGETTGGSAESEPPGEGQVQLVQSGPGLVQPGGSVRISCAASGYTFTNYGMNWVKQAPGKGLEWMGWINTYTGESTYADSFKGRFTFSLDTSASAAYLQINSLRAEDTAVYYCARFAIKGDYWGQGTLLTVSSGGGGSDIQMTQSPSSLSASVGDRVTITCRASQDIRNYLNWYQQKPGKAPKLLIYYTSRLESGVPSRFSGSGSGTDYTLTISSLQPEDFATYYCQQGNTLPWTFGQGTKVEIKGATPPETGAETESPGETTGGSAESEPPGEGEVQLVESGGGLVQPGGSLRLSCAASGYSFTGYTMNWVRQAPGKGLEWVALINPYKGVSTYNQKFKDRFTISVDKSKNTAYLQMNSLRAEDTAVYYCARSGYYGDSDWYFDVWGQGTLVTVSSGTAEAASASGENLYFQGASCGPLGLAGSPGSPAGSPTSTEEGTSESATPESGPGTSTEPSEGSAPGSPAGSPTSTEEGTSTEPSEGSAPGTSTEPSEGSAPGTSESATPESGPGSEPATSGSETPGSEPATSGSETPGSPAGSPTSTEEGTSESATPESGPGTSTEPSEGSAPGTSTEPSEGSAPGSPAGSPTSTEEGTSTEPSEGSAPGTSTEPSEGSAPGTSESATPESGPGTSTEPSEGSAPGTSESATPESGPGSEPATSGSETPGTSTEPSEGSAPGTSTEPSEGSAPGTSESATPESGPGTSESATPESGPGSPAGSPTSTEEGTSESATPESGPGSEPATSGSETPGTSESATPESGPGTSTEPSEGSAPGTSTEPSEGSAPGTSTEPSEGSAPGTSTEPSEGSAPGTSTEPSEGSAPGTSTEPSEGSAPGSPAGSPTSTEEGTSTEPSEGSAPGTSESATPESGPGSEPATSGSETPGTSESATPESGPGSEPATSGSETPGTSESATPESGPGTSTEPSEGSAPGTSESATPESGPGSPAGSPTSTEEGSPAGSPTSTEEGSPAGSPTSTEEGTSESATPESGPGTSTEPSEGSAPGTSESATPESGPGSEPATSGSETPGTSESATPESGPGSEPATSGSETPGTSESATPESGPGTSTEPSEGSAPGSPAGSPTSTEEGTSESATPESGPGSEPATSGSETPGTSESATPESGPGSPAGSPTSTEEGSPAGSPTSTEEGTSTEPSEGSAPGTSESATPESGPGTSESATPESGPGTSESATPESGPGSEPATSGSETPGSEPATSGSETPGSPAGSPTSTEEGTSTEPSEGSAPGTSTEPSEGSAPGSEPATSGSETPGTSESATPESGPGTSTEPSEGSAPGHHHHHH

SEQ ID NO: 847 - protein, 1023 aa, Artificial Sequence
  Description of Artificial Sequence: Synthetic polypeptide
HHHHHHGSPAGSPTSTEEGTSESATPESGPGTSTEPSEGSAPGSPAGSPTSTEEGTSTEPSEGSAPGTSTEPSEGSAPGTSESATPESGPGSEPATSGSETPGSEPATSGSETPGSPAGSPTSTEEGTSESATPESGPGTSTEPSEGSAPEAGEAAGATSAGATGPATSGSETPGTDIQMTQSPSSLSASVGDRVTITCKASQDVSIGVAWYQQKPGKAPKLLIYSASYRYTGVPSRFSGSGSGTDFTLTISSLQPEDFATYYCQQYYIYPYTFGQGTKVEIKGATPPETGAETESPGETTGGSAESEPPGEGEVQLVESGGGLVQPGGSLRLSCAASGFTFTDYTMDWVRQAPGKGLEWVADVNPNSGGSIYNQRFKGRFTLSVDRSKNTLYLQMNSLRAEDTAVYYCARNLGPSFYFDYWGQGTLVTVSSGGGGSELVVTQEPSLTVSPGGTVTLTCRSSNGAVTSSNYANWVQQKPGQAPRGLIGGTNKRAPGTPARFSGSLLGGKAALTLSGVQPEDEAVYYCALWYPNLWVFGGGTKLTVLGATPPETGAETESPGETTGGSAESEPPGEGEVQLLESGGGIVQPGGSLKLSCAASGFTFNTYAMNWVRQAPGKGLEWVARIRSKYNNYATYYADSVKDRFTISRDDSKNTVYLQMNNLKTEDTAVYYCVRHENFGNSYVSWFAHWGQGTLVTVSSGTAEAASASGTTGEAGEAAGATSAGATGPPGSPAGSPTSTEEGTSESATPESGPGTSTEPSEGSAPGSPAGSPTSTEEGTSTEPSEGSAPGTSTEPSEGSAPGTSESATPESGPGSEPATSGSETPGSEPATSGSETPGSPAGSPTSTEEGTSESATPESGPGTSTEPSEGSAPGTSTEPSEGSAPGSPAGSPTSTEEGTSTEPSEGSAPGTSTEPSEGSAPGTSESATPESGPGTSTEPSEGSAPGTSESATPESGPGSEPATSGSETPGTSTEPSEGSAPGTSTEPSEGSAPGTSESATPESGPGTSESATPEGAAEPEA

SEQ ID NO: 848 - protein, 1425 aa, Artificial Sequence
  Description of Artificial Sequence: Synthetic polypeptide
DIQMTQSPSSLSASVGDRVTITCRSTKSLLHSNGITYLYWYQQKPGKAPKLLIYQMSNLASGVPSRFSSSGSGTDFTLTISSLQPEDFATYYCAQNLEIPRTFGQGTKVEIKGATPPETGAETESPGETTGGSAESEPPGEGQVQLVQSGPGLVQPGGSVRISCAASGYTFTNYGMNWVKQAPGKGLEWMGWINTYTGESTYADSFKGRFTFSLDTSASAAYLQINSLRAEDTAVYYCARFAIKGDYWGQGTLLTVSSGGGGSELVVTQEPSLTVSPGGTVTLTCRSSNGAVTSSNYANWVQQKPGQAPRGLIGGTNKRAPGTPARFSGSLLGGKAALTLSGVQPEDEAVYYCALWYPNLWVFGGGTKLTVLGATPPETGAETESPGETTGGSAESEPPGEGEVQLLESGGGIVQPGGSLKLSCAASGFTFNTYAMNWVRQAPGKGLEWVARIRSKYNNYATYYADSVKDRFTISRDDSKNTVYLQMNNLKTEDTAVYYCVRHENFGNSYVSWFAHWGQGTLVTVSSGTAEAASASGESGRAANTAPEGLTGPPGSPAGSPTSTEEGTSESATPESGPGTSTEPSEGSAPGSPAGSPTSTEEGTSTEPSEGSAPGTSTEPSEGSAPGTSESATPESGPGSEPATSGSETPGSEPATSGSETPGSPAGSPTSTEEGTSESATPESGPGTSTEPSEGSAPGTSTEPSEGSAPGSPAGSPTSTEEGTSTEPSEGSAPGTSTEPSEGSAPGTSESATPESGPGTSTEPSEGSAPGTSESATPESGPGSEPATSGSETPGTSTEPSEGSAPGTSTEPSEGSAPGTSESATPESGPGTSESATPESGPGSPAGSPTSTEEGTSESATPESGPGSEPATSGSETPGTSESATPESGPGTSTEPSEGSAPGTSTEPSEGSAPGTSTEPSEGSAPGTSTEPSEGSAPGTSTEPSEGSAPGTSTEPSEGSAPGSPAGSPTSTEEGTSTEPSEGSAPGTSESATPESGPGSEPATSGSETPGTSESATPESGPGSEPATSGSETPGTSESATPESGPGTSTEPSEGSAPGTSESATPESGPGSPAGSPTSTEEGSPAGSPTSTEEGSPAGSPTSTEEGTSESATPESGPGTSTEPSEGSAPGTSESATPESGPGSEPATSGSETPGTSESATPESGPGSEPATSGSETPGTSESATPESGPGTSTEPSEGSAPGSPAGSPTSTEEGTSESATPESGPGSEPATSGSETPGTSESATPESGPGSPAGSPTSTEEGSPAGSPTSTEEGTSTEPSEGSAPGTSESATPESGPGTSESATPESGPGTSESATPESGPGSEPATSGSETPGSEPATSGSETPGSPAGSPTSTEEGTSTEPSEGSAPGTSTEPSEGSAPGSEPATSGSETPGTSESATPESGPGTSTEPSEGSAPGHHHHHH

SEQ ID NO: 849 - protein, 1425 aa, Artificial Sequence
  Description of Artificial Sequence: Synthetic polypeptide
DIQMTQSPSSLSASVGDRVTITCRSTKSLLHSNGITYLYWYQQKPGKAPKLLIYQMSNLASGVPSRFSSSGSGTDFTLTISSLQPEDFATYYCAQNLEIPRTFGQGTKVEIKGATPPETGAETESPGETTGGSAESEPPGEGQVQLVQSGPGLVQPGGSVRISCAASGYTFTNYGMNWVKQAPGKGLEWMGWINTYTGESTYADSFKGRFTFSLDTSASAAYLQINSLRAEDTAVYYCARFAIKGDYWGQGTLLTVSSGGGGSELVVTQEPSLTVSPGGTVTLTCRSSNGEVTTSNYANWVQQKPGQAPRGLIGGTIKRAPGTPARFSGSLLGGKAALTLSGVQPEDEAVYYCALWYPNLWVFGGGTKLTVLGATPPETGAETESPGETTGGSAESEPPGEGEVQLLESGGGIVQPGGSLKLSCAASGFTFNTYAMNWVRQAPGKGLEWVARIRSKYNNYATYYADSVKDRFTISRDDSKNTVYLQMNNLKTEDTAVYYCVRHENFGNSYVSWFAHWGQGTLVTVSSGTAEAASASGESGRAANTAPEGLTGPPGSPAGSPTSTEEGTSESATPESGPGTSTEPSEGSAPGSPAGSPTSTEEGTSTEPSEGSAPGTSTEPSEGSAPGTSESATPESGPGSEPATSGSETPGSEPATSGSETPGSPAGSPTSTEEGTSESATPESGPGTSTEPSEGSAPGTSTEPSEGSAPGSPAGSPTSTEEGTSTEPSEGSAPGTSTEPSEGSAPGTSESATPESGPGTSTEPSEGSAPGTSESATPESGPGSEPATSGSETPGTSTEPSEGSAPGTSTEPSEGSAPGTSESATPESGPGTSESATPESGPGSPAGSPTSTEEGTSESATPESGPGSEPATSGSETPGTSESATPESGPGTSTEPSEGSAPGTSTEPSEGSAPGTSTEPSEGSAPGTSTEPSEGSAPGTSTEPSEGSAPGTSTEPSEGSAPGSPAGSPTSTEEGTSTEPSEGSAPGTSESATPESGPGSEPATSGSETPGTSESATPESGPGSEPATSGSETPGTSESATPESGPGTSTEPSEGSAPGTSESATPESGPGSPAGSPTSTEEGSPAGSPTSTEEGSPAGSPTSTEEGTSESATPESGPGTSTEPSEGSAPGTSESATPESGPGSEPATSGSETPGTSESATPESGPGSEPATSGSETPGTSESATPESGPGTSTEPSEGSAPGSPAGSPTSTEEGTSESATPESGPGSEPATSGSETPGTSESATPESGPGSPAGSPTSTEEGSPAGSPTSTEEGTSTEPSEGSAPGTSESATPESGPGTSESATPESGPGTSESATPESGPGSEPATSGSETPGSEPATSGSETPGSPAGSPTSTEEGTSTEPSEGSAPGTSTEPSEGSAPGSEPATSGSETPGTSESATPESGPGTSTEPSEGSAPGHHHHHH

SEQ ID NO: 850 - protein, 1425 aa, Artificial Sequence
  Description of Artificial Sequence: Synthetic polypeptide
DIQMTQSPSSLSASVGDRVTITCRSTKSLLHSNGITYLYWYQQKPGKAPKLLIYQMSNLASGVPSRFSSSGSGTDFTLTISSLQPEDFATYYCAQNLEIPRTFGQGTKVEIKGATPPETGAETESPGETTGGSAESEPPGEGQVQLVQSGPGLVQPGGSVRISCAASGYTFTNYGMNWVKQAPGKGLEWMGWINTYTGESTYADSFKGRFTFSLDTSASAAYLQINSLRAEDTAVYYCARFAIKGDYWGQGTLLTVSSGGGGSELVVTQEPSHTVSPGGTVTLTCRSSTGAVTSSNYANWVQQKPGQAPRGLIGGTIKRAPGTPARFSGSLLGGKAALTLSGVQPEDEAEYYCALWYPNLWVFGGGTKLTVLGATPPETGAETESPGETTGGSAESEPPGEGEVQLLESGGGIVQPGGSLKLSCAASGFTFNTYAMNWVRQAPGKGLEWVARIRSKYNNYATYYADSVKDRFTISRDDSKNTVYLQMNNLKTEDTAVYYCVRHENFGNSYVSWFAHWGQGTLVTVSSGTAEAASASGESGRAANTAPEGLTGPPGSPAGSPTSTEEGTSESATPESGPGTSTEPSEGSAPGSPAGSPTSTEEGTSTEPSEGSAPGTSTEPSEGSAPGTSESATPESGPGSEPATSGSETPGSEPATSGSETPGSPAGSPTSTEEGTSESATPESGPGTSTEPSEGSAPGTSTEPSEGSAPGSPAGSPTSTEEGTSTEPSEGSAPGTSTEPSEGSAPGTSESATPESGPGTSTEPSEGSAPGTSESATPESGPGSEPATSGSETPGTSTEPSEGSAPGTSTEPSEGSAPGTSESATPESGPGTSESATPESGPGSPAGSPTSTEEGTSESATPESGPGSEPATSGSETPGTSESATPESGPGTSTEPSEGSAPGTSTEPSEGSAPGTSTEPSEGSAPGTSTEPSEGSAPGTSTEPSEGSAPGTSTEPSEGSAPGSPAGSPTSTEEGTSTEPSEGSAPGTSESATPESGPGSEPATSGSETPGTSESATPESGPGSEPATSGSETPGTSESATPESGPGTSTEPSEGSAPGTSESATPESGPGSPAGSPTSTEEGSPAGSPTSTEEGSPAGSPTSTEEGTSESATPESGPGTSTEPSEGSAPGTSESATPESGPGSEPATSGSETPGTSESATPESGPGSEPATSGSETPGTSESATPESGPGTSTEPSEGSAPGSPAGSPTSTEEGTSESATPESGPGSEPATSGSETPGTSESATPESGPGSPAGSPTSTEEGSPAGSPTSTEEGTSTEPSEGSAPGTSESATPESGPGTSESATPESGPGTSESATPESGPGSEPATSGSETPGSEPATSGSETPGSPAGSPTSTEEGTSTEPSEGSAPGTSTEPSEGSAPGSEPATSGSETPGTSESATPESGPGTSTEPSEGSAPGHHHHHH

SEQ ID NO: 851 - protein, 1425 aa, Artificial Sequence
  Description of Artificial Sequence: Synthetic polypeptide
DIQMTQSPSSLSASVGDRVTITCRSTKSLLHSNGITYLYWYQQKPGKAPKLLIYQMSNLASGVPSRFSSSGSGTDFTLTISSLQPEDFATYYCAQNLEIPRTFGQGTKVEIKGATPPETGAETESPGETTGGSAESEPPGEGQVQLVQSGPGLVQPGGSVRISCAASGYTFTNYGMNWVKQAPGKGLEWMGWINTYTGESTYADSFKGRFTFSLDTSASAAYLQINSLRAEDTAVYYCARFAIKGDYWGQGTLLTVSSGGGGSELVVTQEPSHTVSPGGTVTLTCRSSTGEVTTSNYANWVQQKPGQAPRGLIGGTIKRAPGTPARFSGSLLGGKAALTLSGVQPEDEAEYYCALWYPNLWVFGGGTKLTVLGATPPETGAETESPGETTGGSAESEPPGEGEVQLLESGGGIVQPGGSLKLSCAASGFTFNTYAMNWVRQAPGKGLEWVARIRSKYNNYATYYADSVKDRFTISRDDSKNTVYLQMNNLKTEDTAVYYCVRHENFGNSYVSWFAHWGQGTLVTVSSGTAEAASASGESGRAANTAPEGLTGPPGSPAGSPTSTEEGTSESATPESGPGTSTEPSEGSAPGSPAGSPTSTEEGTSTEPSEGSAPGTSTEPSEGSAPGTSESATPESGPGSEPATSGSETPGSEPATSGSETPGSPAGSPTSTEEGTSESATPESGPGTSTEPSEGSAPGTSTEPSEGSAPGSPAGSPTSTEEGTSTEPSEGSAPGTSTEPSEGSAPGTSESATPESGPGTSTEPSEGSAPGTSESATPESGPGSEPATSGSETPGTSTEPSEGSAPGTSTEPSEGSAPGTSESATPESGPGTSESATPESGPGSPAGSPTSTEEGTSESATPESGPGSEPATSGSETPGTSESATPESGPGTSTEPSEGSAPGTSTEPSEGSAPGTSTEPSEGSAPGTSTEPSEGSAPGTSTEPSEGSAPGTSTEPSEGSAPGSPAGSPTSTEEGTSTEPSEGSAPGTSESATPESGPGSEPATSGSETPGTSESATPESGPGSEPATSGSETPGTSESATPESGPGTSTEPSEGSAPGTSESATPESGPGSPAGSPTSTEEGSPAGSPTSTEEGSPAGSPTSTEEGTSESATPESGPGTSTEPSEGSAPGTSESATPESGPGSEPATSGSETPGTSESATPESGPGSEPATSGSETPGTSESATPESGPGTSTEPSEGSAPGSPAGSPTSTEEGTSESATPESGPGSEPATSGSETPGTSESATPESGPGSPAGSPTSTEEGSPAGSPTSTEEGTSTEPSEGSAPGTSESATPESGPGTSESATPESGPGTSESATPESGPGSEPATSGSETPGSEPATSGSETPGSPAGSPTSTEEGTSTEPSEGSAPGTSTEPSEGSAPGSEPATSGSETPGTSESATPESGPGTSTEPSEGSAPGHHHHHH

SEQ ID NO: 852 - protein, 1743 aa, Artificial Sequence
  Description of Artificial Sequence: Synthetic polypeptide
HHHHHHSPAGSPTSTEEGTSESATPESGPGTSTEPSEGSAPGTSESATPESGPGSEPATSGSETPGTSESATPESGPGSEPATSGSETPGTSESATPESGPGTSTEPSEGSAPGSPAGSPTSTEEGTSESATPESGPGSEPATSGSETPGTSESATPESGPGSPAGSPTSTEEGSPAGSPTSTEEGTSTEPSEGSAPGTSESATPESGPGTSESATPESGPGTSESATPESGPGSEPATSGSETPGSEPATSGSETPGSPAGSPTSTEEGTSTEPSEGSAPGTSTEPSEGSAPGGSAPEAGRSANHTPAGLTGPATSGSETPGTDIQMTQSPSSLSASVGDRVTITCKASQDVSIGVAWYQQKPGKAPKLLIYSASYRYTGVPSRFSGSGSGTDFTLTISSLQPEDFATYYCQQYYIYPYTFGQGTKVEIKGATPPETGAETESPGETTGGSAESEPPGEGEVQLVESGGGLVQPGGSLRLSCAASGFTFTDYTMDWVRQAPGKGLEWVADVNPNSGGSIYNQRFKGRFTLSVDRSKNTLYLQMNSLRAEDTAVYYCARNLGPSFYFDYWGQGTLVTVSSGGGGSELVVTQEPSLTVSPGGTVTLTCRSSNGAVTSSNYANWVQQKPGQAPRGLIGGTNKRAPGTPARFSGSLLGGKAALTLSGVQPEDEAVYYCALWYPNLWVFGGGTKLTVLGATPPETGAETESPGETTGGSAESEPPGEGEVQLLESGGGIVQPGGSLKLSCAASGFTFNTYAMNWVRQAPGKGLEWVARIRSKYNNYATYYADSVKDRFTISRDDSKNTVYLQMNNLKTEDTAVYYCVRHENFGNSYVSWFAHWGQGTLVTVSSGTAEAASASGEAGRSANHTPAGLTGPPGSPAGSPTSTEEGTSESATPESGPGTSTEPSEGSAPGSPAGSPTSTEEGTSTEPSEGSAPGTSTEPSEGSAPGTSESATPESGPGSEPATSGSETPGSEPATSGSETPGSPAGSPTSTEEGTSESATPESGPGTSTEPSEGSAPGTSTEPSEGSAPGSPAGSPTSTEEGTSTEPSEGSAPGTSTEPSEGSAPGTSESATPESGPGTSTEPSEGSAPGTSESATPESGPGSEPATSGSETPGTSTEPSEGSAPGTSTEPSEGSAPGTSESATPESGPGTSESATPESGPGSPAGSPTSTEEGTSESATPESGPGSEPATSGSETPGTSESATPESGPGTSTEPSEGSAPGTSTEPSEGSAPGTSTEPSEGSAPGTSTEPSEGSAPGTSTEPSEGSAPGTSTEPSEGSAPGSPAGSPTSTEEGTSTEPSEGSAPGTSESATPESGPGSEPATSGSETPGTSESATPESGPGSEPATSGSETPGTSESATPESGPGTSTEPSEGSAPGTSESATPESGPGSPAGSPTSTEEGSPAGSPTSTEEGSPAGSPTSTEEGTSESATPESGPGTSTEPSEGSAPGTSESATPESGPGSEPATSGSETPGTSESATPESGPGSEPATSGSETPGTSESATPESGPGTSTEPSEGSAPGSPAGSPTSTEEGTSESATPESGPGSEPATSGSETPGTSESATPESGPGSPAGSPTSTEEGSPAGSPTSTEEGTSTEPSEGSAPGTSESATPESGPGTSESATPESGPGTSESATPESGPGSEPATSGSETPGSEPATSGSETPGSPAGSPTSTEEGTSTEPSEGSAPGTSTEPSEGSAPGSEPATSGSETPGTSESATPESGPGTSTEPSEGAAEPEA

SEQ ID NO: 853 - protein, 1743 aa, Artificial Sequence
  Description of Artificial Sequence: Synthetic polypeptide
HHHHHHSPAGSPTSTEEGTSESATPESGPGTSTEPSEGSAPGTSESATPESGPGSEPATSGSETPGTSESATPESGPGSEPATSGSETPGTSESATPESGPGTSTEPSEGSAPGSPAGSPTSTEEGTSESATPESGPGSEPATSGSETPGTSESATPESGPGSPAGSPTSTEEGSPAGSPTSTEEGTSTEPSEGSAPGTSESATPESGPGTSESATPESGPGTSESATPESGPGSEPATSGSETPGSEPATSGSETPGSPAGSPTSTEEGTSTEPSEGSAPGTSTEPSEGSAPGGSAPEAGRSANHTPAGLTGPATSGSETPGTDIQMTQSPSSLSASVGDRVTITCQASQDISNYLNWYQQKPGKAPKLLIYDASNLETGVPSRFSGSGSGTDFTFTISSLQPEDIATYFCQHFDHLPLAFGGGTKVEIKGATPPETGAETESPGETTGGSAESEPPGEGQVQLQESGPGLVKPSETLSLTCTVSGGSVSSGDYYWTWIRQSPGKGLEWIGHIYYSGNTNYNPSLKSRLTISIDTSKTQFSLKLSSVTAADTAIYYCVRDRVTGAFDIWGQGTMVTVSSGGGGSELVVTQEPSLTVSPGGTVTLTCRSSNGAVTSSNYANWVQQKPGQAPRGLIGGTNKRAPGTPARFSGSSLGGSAALTLSGVQPEDEAVYYCALWYPNLWVFGGGTKLTVLGATPPETGAETESPGETTGGSAESEPPGEGEVQLQESGGGIVQPGGSLKLSCAASGFTFNTYAMNWVRQAPGKGLEWVARIRSKYNNYATYYADSVKDRFTISRDDSKNTVYLQMNNLKTEDTAVYYCVRHENFGNSYVSWFAHWGQGTLVTVSSGTAEAASASGEAGRSANHTPAGLTGPPGSPAGSPTSTEEGTSESATPESGPGTSTEPSEGSAPGSPAGSPTSTEEGTSTEPSEGSAPGTSTEPSEGSAPGTSESATPESGPGSEPATSGSETPGSEPATSGSETPGSPAGSPTSTEEGTSESATPESGPGTSTEPSEGSAPGTSTEPSEGSAPGSPAGSPTSTEEGTSTEPSEGSAPGTSTEPSEGSAPGTSESATPESGPGTSTEPSEGSAPGTSESATPESGPGSEPATSGSETPGTSTEPSEGSAPGTSTEPSEGSAPGTSESATPESGPGTSESATPESGPGSPAGSPTSTEEGTSESATPESGPGSEPATSGSETPGTSESATPESGPGTSTEPSEGSAPGTSTEPSEGSAPGTSTEPSEGSAPGTSTEPSEGSAPGTSTEPSEGSAPGTSTEPSEGSAPGSPAGSPTSTEEGTSTEPSEGSAPGTSESATPESGPGSEPATSGSETPGTSESATPESGPGSEPATSGSETPGTSESATPESGPGTSTEPSEGSAPGTSESATPESGPGSPAGSPTSTEEGSPAGSPTSTEEGSPAGSPTSTEEGTSESATPESGPGTSTEPSEGSAPGTSESATPESGPGSEPATSGSETPGTSESATPESGPGSEPATSGSETPGTSESATPESGPGTSTEPSEGSAPGSPAGSPTSTEEGTSESATPESGPGSEPATSGSETPGTSESATPESGPGSPAGSPTSTEEGSPAGSPTSTEEGTSTEPSEGSAPGTSESATPESGPGTSESATPESGPGTSESATPESGPGSEPATSGSETPGSEPATSGSETPGSPAGSPTSTEEGTSTEPSEGSAPGTSTEPSEGSAPGSEPATSGSETPGTSESATPESGPGTSTEPSEGAAEPEA

SEQ ID NO: 854 - protein, 1743 aa, Artificial Sequence
  Description of Artificial Sequence: Synthetic polypeptide
HHHHHHSPAGSPTSTEEGTSESATPESGPGTSTEPSEGSAPGTSESATPESGPGSEPATSGSETPGTSESATPESGPGSEPATSGSETPGTSESATPESGPGTSTEPSEGSAPGSPAGSPTSTEEGTSESATPESGPGSEPATSGSETPGTSESATPESGPGSPAGSPTSTEEGSPAGSPTSTEEGTSTEPSEGSAPGTSESATPESGPGTSESATPESGPGTSESATPESGPGSEPATSGSETPGSEPATSGSETPGSPAGSPTSTEEGTSTEPSEGSAPGTSTEPSEGSAPGGSAPEAGRSANHTPAGLTGPATSGSETPGTDIQMTQSPSSLSASVGDRVTITCQASQDISNYLNWYQQKPGKAPKLLIYDASNLETGVPSRFSGSGSGTDFTFTISRLQPEDTATYFCQHFDHLPLAFGGGTKVEIKGATPPETGAETESPGETTGGSAESEPPGEGQVQLQESGPGAVKPSETLSLTCTVSGGSVSSGDYYWTWIRQSPGKGLEWIGHIYYSGNTNYNPSLKSRLTISIDTSKTQFSLKLSSVTAADTATYYCVRDRVTGAFDIWGQGTAVTVSSGGGGSELVVTQEPSLTVSPGGTVTLTCRSSNGAVTSSNYANWVQQKPGQAPRGLIGGTNKRAPGTPARFSGSSLGGSAALTLSGVQPEDEAVYYCALWYPNLWVFGGGTKLTVLGATPPETGAETESPGETTGGSAESEPPGEGEVQLQESGGGIVQPGGSLKLSCAASGFTFNTYAMNWVRQAPGKGLEWVARIRSKYNNYATYYADSVKDRFTISRDDSKNTVYLQMNNLKTEDTAVYYCVRHENFGNSYVSWFAHWGQGTLVTVSSGTAEAASASGEAGRSANHTPAGLTGPPGSPAGSPTSTEEGTSESATPESGPGTSTEPSEGSAPGSPAGSPTSTEEGTSTEPSEGSAPGTSTEPSEGSAPGTSESATPESGPGSEPATSGSETPGSEPATSGSETPGSPAGSPTSTEEGTSESATPESGPGTSTEPSEGSAPGTSTEPSEGSAPGSPAGSPTSTEEGTSTEPSEGSAPGTSTEPSEGSAPGTSESATPESGPGTSTEPSEGSAPGTSESATPESGPGSEPATSGSETPGTSTEPSEGSAPGTSTEPSEGSAPGTSESATPESGPGTSESATPESGPGSPAGSPTSTEEGTSESATPESGPGSEPATSGSETPGTSESATPESGPGTSTEPSEGSAPGTSTEPSEGSAPGTSTEPSEGSAPGTSTEPSEGSAPGTSTEPSEGSAPGTSTEPSEGSAPGSPAGSPTSTEEGTSTEPSEGSAPGTSESATPESGPGSEPATSGSETPGTSESATPESGPGSEPATSGSETPGTSESATPESGPGTSTEPSEGSAPGTSESATPESGPGSPAGSPTSTEEGSPAGSPTSTEEGSPAGSPTSTEEGTSESATPESGPGTSTEPSEGSAPGTSESATPESGPGSEPATSGSETPGTSESATPESGPGSEPATSGSETPGTSESATPESGPGTSTEPSEGSAPGSPAGSPTSTEEGTSESATPESGPGSEPATSGSETPGTSESATPESGPGSPAGSPTSTEEGSPAGSPTSTEEGTSTEPSEGSAPGTSESATPESGPGTSESATPESGPGTSESATPESGPGSEPATSGSETPGSEPATSGSETPGSPAGSPTSTEEGTSTEPSEGSAPGTSTEPSEGSAPGSEPATSGSETPGTSESATPESGPGTSTEPSEGAAEPEA

SEQ ID NO: 855 - protein, 1459 aa, Artificial Sequence
  Description of Artificial Sequence: Synthetic polypeptide
HHHHHHSPAGSPTSTEEGTSESATPESGPGTSTEPSEGSAPGTSESATPESGPGSEPATSGSETPGTSESATPESGPGSEPATSGSETPGTSESATPESGPGTSTEPSEGSAPGSPAGSPTSTEEGTSESATPESGPGSEPATSGSETPGTSESATPESGPGSPAGSPTSTEEGSPAGSPTSTEEGTSTEPSEGSAPGTSESATPESGPGTSESATPESGPGTSESATPESGPGSEPATSGSETPGSEPATSGSETPGSPAGSPTSTEEGTSTEPSEGSAPGTSTEPSEGSAPGGSAPEAGRSANHTPAGLTGPATSGSETPGTDIQMTQSPSSLSASVGDRVTITCKASQDVSIGVAWYQQKPGKAPKLLIYSASYRYTGVPSRFSGSGSGTDFTLTISSLQPEDFATYYCQQYYIYPYTFGQGTKVEIKGATPPETGAETESPGETTGGSAESEPPGEGEVQLVESGGGLVQPGGSLRLSCAASGFTFTDYTMDWVRQAPGKGLEWVADVNPNSGGSIYNQRFKGRFTLSVDRSKNTLYLQMNSLRAEDTAVYYCARNLGPSFYFDYWGQGTLVTVSSGGGGSELVVTQEPSLTVSPGGTVTLTCRSSNGAVTSSNYANWVQQKPGQAPRGLIGGTNKRAPGTPARFSGSLLGGKAALTLSGVQPEDEAVYYCALWYPNLWVFGGGTKLTVLGATPPETGAETESPGETTGGSAESEPPGEGEVQLLESGGGIVQPGGSLKLSCAASGFTFNTYAMNWVRQAPGKGLEWVARIRSKYNNYATYYADSVKDRFTISRDDSKNTVYLQMNNLKTEDTAVYYCVRHENFGNSYVSWFAHWGQGTLVTVSSGTAEAASASGEAGRSANHTPAGLTGPPGSPAGSPTSTEEGTSESATPESGPGTSTEPSEGSAPGSPAGSPTSTEEGTSTEPSEGSAPGTSTEPSEGSAPGTSESATPESGPGSEPATSGSETPGSEPATSGSETPGSPAGSPTSTEEGTSESATPESGPGTSTEPSEGSAPGTSTEPSEGSAPGSPAGSPTSTEEGTSTEPSEGSAPGTSTEPSEGSAPGTSESATPESGPGTSTEPSEGSAPGTSESATPESGPGSEPATSGSETPGTSTEPSEGSAPGTSTEPSEGSAPGTSESATPESGPGTSESATPESGPGSPAGSPTSTEEGTSESATPESGPGSEPATSGSETPGTSESATPESGPGTSTEPSEGSAPGTSTEPSEGSAPGTSTEPSEGSAPGTSTEPSEGSAPGTSTEPSEGSAPGTSTEPSEGSAPGSPAGSPTSTEEGTSTEPSEGSAPGTSESATPESGPGSEPATSGSETPGTSESATPESGPGSEPATSGSETPGTSESATPESGPGTSTEPSEGSAPGTSESATPESGPGSPAGSPTSTEEGSPAGSPTSTEEGSPAGSPTSTEEGTSESATPESGPGTSTEPSEGSAPGAAEPEA

SEQ ID NO: 856 - protein, 1175 aa, Artificial Sequence
  Description of Artificial Sequence: Synthetic polypeptide
HHHHHHSPAGSPTSTEEGTSESATPESGPGTSTEPSEGSAPGTSESATPESGPGSEPATSGSETPGTSESATPESGPGSEPATSGSETPGTSESATPESGPGTSTEPSEGSAPGSPAGSPTSTEEGTSESATPESGPGSEPATSGSETPGTSESATPESGPGSPAGSPTSTEEGSPAGSPTSTEEGTSTEPSEGSAPGTSESATPESGPGTSESATPESGPGTSESATPESGPGSEPATSGSETPGSEPATSGSETPGSPAGSPTSTEEGTSTEPSEGSAPGTSTEPSEGSAPGGSAPEAGRSANHTPAGLTGPATSGSETPGTDIQMTQSPSSLSASVGDRVTITCKASQDVSIGVAWYQQKPGKAPKLLIYSASYRYTGVPSRFSGSGSGTDFTLTISSLQPEDFATYYCQQYYIYPYTFGQGTKVEIKGATPPETGAETESPGETTGGSAESEPPGEGEVQLVESGGGLVQPGGSLRLSCAASGFTFTDYTMDWVRQAPGKGLEWVADVNPNSGGSIYNQRFKGRFTLSVDRSKNTLYLQMNSLRAEDTAVYYCARNLGPSFYFDYWGQGTLVTVSSGGGGSELVVTQEPSLTVSPGGTVTLTCRSSNGAVTSSNYANWVQQKPGQAPRGLIGGTNKRAPGTPARFSGSLLGGKAALTLSGVQPEDEAVYYCALWYPNLWVFGGGTKLTVLGATPPETGAETESPGETTGGSAESEPPGEGEVQLLESGGGIVQPGGSLKLSCAASGFTFNTYAMNWVRQAPGKGLEWVARIRSKYNNYATYYADSVKDRFTISRDDSKNTVYLQMNNLKTEDTAVYYCVRHENFGNSYVSWFAHWGQGTLVTVSSGTAEAASASGEAGRSANHTPAGLTGPPGSPAGSPTSTEEGTSESATPESGPGTSTEPSEGSAPGSPAGSPTSTEEGTSTEPSEGSAPGTSTEPSEGSAPGTSESATPESGPGSEPATSGSETPGSEPATSGSETPGSPAGSPTSTEEGTSESATPESGPGTSTEPSEGSAPGTSTEPSEGSAPGSPAGSPTSTEEGTSTEPSEGSAPGTSTEPSEGSAPGTSESATPESGPGTSTEPSEGSAPGTSESATPESGPGSEPATSGSETPGTSTEPSEGSAPGTSTEPSEGSAPGTSESATPESGPGTSESATPESGPGSPAGAAEPEA

SEQ ID NO: 857 - protein, 1020 aa, Artificial Sequence
  Description of Artificial Sequence: Synthetic polypeptide
HHHHHHGSPAGSPTSTEEGTSESATPESGPGTSTEPSEGSAPGSPAGSPTSTEEGTSTEPSEGSAPGTSTEPSEGSAPGTSESATPESGPGSEPATSGSETPGSEPATSGSETPGSPAGSPTSTEEGTSESATPESGPGTSTEPSEGSAPEAGRSANHTPAGLTGPATSGSETPGTDIQMTQSPSSLSASVGDRVTITCKASQDVSIGVAWYQQKPGKAPKLLIYSASYRYTGVPSRFSGSGSGTDFTLTISSLQPEDFATYYCQQYYIYPYTFGQGTKVEIKGATPPETGAETESPGETTGGSAESEPPGEGEVQLVESGGGLVQPGGSLRLSCAASGFTFTDYTMDWVRQAPGKGLEWVADVNPNSGGSIYNQRFKGRFTLSVDRSKNTLYLQMNSLRAEDTAVYYCARNLGPSFYFDYWGQGTLVTVSSGGGGSELVVTQEPSLTVSPGGTVTLTCRSSNGAVTSSNYANWVQQKPGQAPRGLIGGTNKRAPGTPARFSGSLLGGKAALTLSGVQPEDEAVYYCALWYPNLWVFGGGTKLTVLGATPPETGAETESPGETTGGSAESEPPGEGEVQLLESGGGIVQPGGSLKLSCAASGFTFNTYAMNWVRQAPGKGLEWVARIRSKYNNYATYYADSVKDRFTISRDDSKNTVYLQMNNLKTEDTAVYYCVRHENFGNSYVSWFAHWGQGTLVTVSSGTAEAASASGEAGRSANHTPAGLTGPPGSPAGSPTSTEEGTSESATPESGPGTSTEPSEGSAPGSPAGSPTSTEEGTSTEPSEGSAPGTSTEPSEGSAPGTSESATPESGPGSEPATSGSETPGSEPATSGSETPGSPAGSPTSTEEGTSESATPESGPGTSTEPSEGSAPGTSTEPSEGSAPGSPAGSPTSTEEGTSTEPSEGSAPGTSTEPSEGSAPGTSESATPESGPGTSTEPSEGSAPGTSESATPESGPGSEPATSGSETPGTSTEPSEGSAPGTSTEPSEGSAPGTSESATPESGPGTSESATPEGAAEPEA

SEQ ID NO: 858 - protein, 1743 aa, Artificial Sequence
  Description of Artificial Sequence: Synthetic polypeptide
HHHHHHSPAGSPTSTEEGTSESATPESGPGTSTEPSEGSAPGTSESATPESGPGSEPATSGSETPGTSESATPESGPGSEPATSGSETPGTSESATPESGPGTSTEPSEGSAPGSPAGSPTSTEEGTSESATPESGPGSEPATSGSETPGTSESATPESGPGSPAGSPTSTEEGSPAGSPTSTEEGTSTEPSEGSAPGTSESATPESGPGTSESATPESGPGTSESATPESGPGSEPATSGSETPGSEPATSGSETPGSPAGSPTSTEEGTSTEPSEGSAPGTSTEPSEGSAPGGSAPEAGRSANHTPAGLTGPATSGSETPGTDIQMTQSPSSLSASVGDRVTITCQASQDISNYLNWYQQKPGKAPKLLIYDASNLETGVPSRFSGSGSGTDFTFTISSLQPEDIATYFCQHFDHLPLAFGGGTKVEIKGATPPETGAETESPGETTGGSAESEPPGEGQVQLQESGPGLVKPSETLSLTCTVSGGSVSSGDYYWTWIRQSPGKGLEWIGHIYYSGNTNYNPSLKSRLTISIDTSKTQFSLKLSSVTAADTAIYYCVRDRVTGAFDIWGQGTMVTVSSGGGGSELVVTQEPSLTVSPGGTVTLTCRSSTGAVTTSNYANWVQQKPGQAPRGLIGGTNKRAPGTPARFSGSLLGGKAALTLSGVQPEDEAEYYCALWYSNLWVFGGGTKLTVLGATPPETGAETESPGETTGGSAESEPPGEGEVQLLESGGGLVQPGGSLKLSCAASGFTFNTYAMNWVRQAPGKGLEWVARIRSKYNNYATYYADSVKDRFTISRDDSKNTAYLQMNNLKTEDTAVYYCVRHGNFGNSYVSWFAYWGQGTLVTVSSGTAEAASASGEAGRSANHTPAGLTGPPGSPAGSPTSTEEGTSESATPESGPGTSTEPSEGSAPGSPAGSPTSTEEGTSTEPSEGSAPGTSTEPSEGSAPGTSESATPESGPGSEPATSGSETPGSEPATSGSETPGSPAGSPTSTEEGTSESATPESGPGTSTEPSEGSAPGTSTEPSEGSAPGSPAGSPTSTEEGTSTEPSEGSAPGTSTEPSEGSAPGTSESATPESGPGTSTEPSEGSAPGTSESATPESGPGSEPATSGSETPGTSTEPSEGSAPGTSTEPSEGSAPGTSESATPESGPGTSESATPESGPGSPAGSPTSTEEGTSESATPESGPGSEPATSGSETPGTSESATPESGPGTSTEPSEGSAPGTSTEPSEGSAPGTSTEPSEGSAPGTSTEPSEGSAPGTSTEPSEGSAPGTSTEPSEGSAPGSPAGSPTSTEEGTSTEPSEGSAPGTSESATPESGPGSEPATSGSETPGTSESATPESGPGSEPATSGSETPGTSESATPESGPGTSTEPSEGSAPGTSESATPESGPGSPAGSPTSTEEGSPAGSPTSTEEGSPAGSPTSTEEGTSESATPESGPGTSTEPSEGSAPGTSESATPESGPGSEPATSGSETPGTSESATPESGPGSEPATSGSETPGTSESATPESGPGTSTEPSEGSAPGSPAGSPTSTEEGTSESATPESGPGSEPATSGSETPGTSESATPESGPGSPAGSPTSTEEGSPAGSPTSTEEGTSTEPSEGSAPGTSESATPESGPGTSESATPESGPGTSESATPESGPGSEPATSGSETPGSEPATSGSETPGSPAGSPTSTEEGTSTEPSEGSAPGTSTEPSEGSAPGSEPATSGSETPGTSESATPESGPGTSTEPSEGAAEPEA

SEQ ID NO: 859 - protein, 1743 aa, Artificial Sequence
  Description of Artificial Sequence: Synthetic polypeptide
HHHHHHSPAGSPTSTEEGTSESATPESGPGTSTEPSEGSAPGTSESATPESGPGSEPATSGSETPGTSESATPESGPGSEPATSGSETPGTSESATPESGPGTSTEPSEGSAPGSPAGSPTSTEEGTSESATPESGPGSEPATSGSETPGTSESATPESGPGSPAGSPTSTEEGSPAGSPTSTEEGTSTEPSEGSAPGTSESATPESGPGTSESATPESGPGTSESATPESGPGSEPATSGSETPGSEPATSGSETPGSPAGSPTSTEEGTSTEPSEGSAPGTSTEPSEGSAPGGSAPEAGRSANHTPAGLTGPATSGSETPGTDIQMTQSPSSLSASVGDRVTITCQASQDISNYLNWYQQKPGKAPKLLIYDASNLETGVPSRFSGSGSGTDFTFTISSLQPEDTATYFCQHFDHLPLAFGGGTKVEIKGATPPETGAETESPGETTGGSAESEPPGEGQVQLQESGPGAVKPSETLSLTCTVSGGSVSSGDYYWTWIRQSPGKGLEWIGHIYYSGNTNYNPSLKSRLTISIDTSKTQFSLKLSSVTAADTATYYCVRDRVTGAFDIWGQGTAVTVSSGGGGSELVVTQEPSLTVSPGGTVTLTCRSSTGAVTTSNYANWVQQKPGQAPRGLIGGTNKRAPGTPARFSGSSLGGSAALTLSGVQPEDEAEYYCALWYSNLWVFGGGTKLTVLGATPPETGAETESPGETTGGSAESEPPGEGEVQLQESGGGLVQPGGSLKLSCAASGFTFNTYAMNWVRQAPGKGLEWVARIRSKYNNYATYYADSVKDRFTISRDDSKNTAYLQMNNLKTEDTAVYYCVRHGNFGNSYVSWFAYWGQGTLVTVSSGTAEAASASGEAGRSANHTPAGLTGPPGSPAGSPTSTEEGTSESATPESGPGTSTEPSEGSAPGSPAGSPTSTEEGTSTEPSEGSAPGTSTEPSEGSAPGTSESATPESGPGSEPATSGSETPGSEPATSGSETPGSPAGSPTSTEEGTSESATPESGPGTSTEPSEGSAPGTSTEPSEGSAPGSPAGSPTSTEEGTSTEPSEGSAPGTSTEPSEGSAPGTSESATPESGPGTSTEPSEGSAPGTSESATPESGPGSEPATSGSETPGTSTEPSEGSAPGTSTEPSEGSAPGTSESATPESGPGTSESATPESGPGSPAGSPTSTEEGTSESATPESGPGSEPATSGSETPGTSESATPESGPGTSTEPSEGSAPGTSTEPSEGSAPGTSTEPSEGSAPGTSTEPSEGSAPGTSTEPSEGSAPGTSTEPSEGSAPGSPAGSPTSTEEGTSTEPSEGSAPGTSESATPESGPGSEPATSGSETPGTSESATPESGPGSEPATSGSETPGTSESATPESGPGTSTEPSEGSAPGTSESATPESGPGSPAGSPTSTEEGSPAGSPTSTEEGSPAGSPTSTEEGTSESATPESGPGTSTEPSEGSAPGTSESATPESGPGSEPATSGSETPGTSESATPESGPGSEPATSGSETPGTSESATPESGPGTSTEPSEGSAPGSPAGSPTSTEEGTSESATPESGPGSEPATSGSETPGTSESATPESGPGSPAGSPTSTEEGSPAGSPTSTEEGTSTEPSEGSAPGTSESATPESGPGTSESATPESGPGTSESATPESGPGSEPATSGSETPGSEPATSGSETPGSPAGSPTSTEEGTSTEPSEGSAPGTSTEPSEGSAPGSEPATSGSETPGTSESATPESGPGTSTEPSEGAAEPEA

SEQ ID NO: 860 - protein, 1743 aa, Artificial Sequence
  Description of Artificial Sequence: Synthetic polypeptide
HHHHHHSPAGSPTSTEEGTSESATPESGPGTSTEPSEGSAPGTSESATPESGPGSEPATSGSETPGTSESATPESGPGSEPATSGSETPGTSESATPESGPGTSTEPSEGSAPGSPAGSPTSTEEGTSESATPESGPGSEPATSGSETPGTSESATPESGPGSPAGSPTSTEEGSPAGSPTSTEEGTSTEPSEGSAPGTSESATPESGPGTSESATPESGPGTSESATPESGPGSEPATSGSETPGSEPATSGSETPGSPAGSPTSTEEGTSTEPSEGSAPGTSTEPSEGSAPGGSAPEAGRSANHTPAGLTGPATSGSETPGTDIQMTQSPSSLSASVGDRVTITCQASQDISNYLNWYQQKPGKAPKLLIYDASNLETGVPSRFSGSGSGTDFTFTISSLQPEDTATYFCQHFDHLPLAFGGGTKVEIKGATPPETGAETESPGETTGGSAESEPPGEGQVQLQESGPGAVKPSETLSLTCTVSGGSVSSGDYYWTWIRQSPGKGLEWIGHIYYSGNTNYNPSLKSRLTISIDTSKTQFSLKLSSVTAADTATYYCVRDRVTGAFDIWGQGTTVTVSSGGGGSELVVTQEPSLTVSPGGTVTLTCRSSTGAVTTSNYANWVQQKPGQAPRGLIGGTNKRAPGTPARFSGSSLGGSAALTLSGVQPEDEAEYYCALWYSNLWVFGGGTKLTVLGATPPETGAETESPGETTGGSAESEPPGEGEVQLQESGGGLVQPGGSLKLSCAASGFTFNTYAMNWVRQAPGKGLEWVARIRSKYNNYATYYADSVKDRFTISRDDSKNTAYLQMNNLKTEDTAVYYCVRHGNFGNSYVSWFAYWGQGTLVTVSSGTAEAASASGEAGRSANHTPAGLTGPPGSPAGSPTSTEEGTSESATPESGPGTSTEPSEGSAPGSPAGSPTSTEEGTSTEPSEGSAPGTSTEPSEGSAPGTSESATPESGPGSEPATSGSETPGSEPATSGSETPGSPAGSPTSTEEGTSESATPESGPGTSTEPSEGSAPGTSTEPSEGSAPGSPAGSPTSTEEGTSTEPSEGSAPGTSTEPSEGSAPGTSESATPESGPGTSTEPSEGSAPGTSESATPESGPGSEPATSGSETPGTSTEPSEGSAPGTSTEPSEGSAPGTSESATPESGPGTSESATPESGPGSPAGSPTSTEEGTSESATPESGPGSEPATSGSETPGTSESATPESGPGTSTEPSEGSAPGTSTEPSEGSAPGTSTEPSEGSAPGTSTEPSEGSAPGTSTEPSEGSAPGTSTEPSEGSAPGSPAGSPTSTEEGTSTEPSEGSAPGTSESATPESGPGSEPATSGSETPGTSESATPESGPGSEPATSGSETPGTSESATPESGPGTSTEPSEGSAPGTSESATPESGPGSPAGSPTSTEEGSPAGSPTSTEEGSPAGSPTSTEEGTSESATPESGPGTSTEPSEGSAPGTSESATPESGPGSEPATSGSETPGTSESATPESGPGSEPATSGSETPGTSESATPESGPGTSTEPSEGSAPGSPAGSPTSTEEGTSESATPESGPGSEPATSGSETPGTSESATPESGPGSPAGSPTSTEEGSPAGSPTSTEEGTSTEPSEGSAPGTSESATPESGPGTSESATPESGPGTSESATPESGPGSEPATSGSETPGSEPATSGSETPGSPAGSPTSTEEGTSTEPSEGSAPGTSTEPSEGSAPGSEPATSGSETPGTSESATPESGPGTSTEPSEGAAEPEA

SEQ ID NO: 861 - protein, 1743 aa, Artificial Sequence
  Description of Artificial Sequence: Synthetic polypeptide
HHHHHHSPAGSPTSTEEGTSESATPESGPGTSTEPSEGSAPGTSESATPESGPGSEPATSGSETPGTSESATPESGPGSEPATSGSETPGTSESATPESGPGTSTEPSEGSAPGSPAGSPTSTEEGTSESATPESGPGSEPATSGSETPGTSESATPESGPGSPAGSPTSTEEGSPAGSPTSTEEGTSTEPSEGSAPGTSESATPESGPGTSESATPESGPGTSESATPESGPGSEPATSGSETPGSEPATSGSETPGSPAGSPTSTEEGTSTEPSEGSAPGTSTEPSEGSAPGGSAPEAGRSANHTPAGLTGPATSGSETPGTDIQMTQSPSSLSASVGDRVTITCQASQDISNYLNWYQQKPGKAPKLLIYDASNLETGVPSRFSGSGSGTDFTFTISSLQPEDTATYFCQHFDHLPLAFGGGTKVEIKGATPPETGAETESPGETTGGSAESEPPGEGQVQLQESGPGLVKPSQTLSLTCTVSGGSVSSGDYYWTWIRQRPGKGLEWIGHIYYSGNTNYNPSLKSRLTISIDTSKTQFSLKLSSVTAADTAIYYCVRDRVTGAFDIWGQGTMVTVSSGGGGSELVVTQEPSLTVSPGGTVTLTCRSSTGAVTTSNYANWVQQKPGQAPRGLIGGTNKRAPGTPARFSGSSLGGSAALTLSGVQPEDEAEYYCALWYSNLWVFGGGTKLTVLGATPPETGAETESPGETTGGSAESEPPGEGEVQLQESGGGLVQPGGSLKLSCAASGFTFNTYAMNWVRQAPGKGLEWVARIRSKYNNYATYYADSVKDRFTISRDDSKNTAYLQMNNLKTEDTAVYYCVRHGNFGNSYVSWFAYWGQGTLVTVSSGTAEAASASGEAGRSANHTPAGLTGPPGSPAGSPTSTEEGTSESATPESGPGTSTEPSEGSAPGSPAGSPTSTEEGTSTEPSEGSAPGTSTEPSEGSAPGTSESATPESGPGSEPATSGSETPGSEPATSGSETPGSPAGSPTSTEEGTSESATPESGPGTSTEPSEGSAPGTSTEPSEGSAPGSPAGSPTSTEEGTSTEPSEGSAPGTSTEPSEGSAPGTSESATPESGPGTSTEPSEGSAPGTSESATPESGPGSEPATSGSETPGTSTEPSEGSAPGTSTEPSEGSAPGTSESATPESGPGTSESATPESGPGSPAGSPTSTEEGTSESATPESGPGSEPATSGSETPGTSESATPESGPGTSTEPSEGSAPGTSTEPSEGSAPGTSTEPSEGSAPGTSTEPSEGSAPGTSTEPSEGSAPGTSTEPSEGSAPGSPAGSPTSTEEGTSTEPSEGSAPGTSESATPESGPGSEPATSGSETPGTSESATPESGPGSEPATSGSETPGTSESATPESGPGTSTEPSEGSAPGTSESATPESGPGSPAGSPTSTEEGSPAGSPTSTEEGSPAGSPTSTEEGTSESATPESGPGTSTEPSEGSAPGTSESATPESGPGSEPATSGSETPGTSESATPESGPGSEPATSGSETPGTSESATPESGPGTSTEPSEGSAPGSPAGSPTSTEEGTSESATPESGPGSEPATSGSETPGTSESATPESGPGSPAGSPTSTEEGSPAGSPTSTEEGTSTEPSEGSAPGTSESATPESGPGTSESATPESGPGTSESATPESGPGSEPATSGSETPGSEPATSGSETPGSPAGSPTSTEEGTSTEPSEGSAPGTSTEPSEGSAPGSEPATSGSETPGTSESATPESGPGTSTEPSEGAAEPEA

SEQ ID NO: 862 - protein, 1743 aa, Artificial Sequence
  Description of Artificial Sequence: Synthetic polypeptide
HHHHHHSPAGSPTSTEEGTSESATPESGPGTSTEPSEGSAPGTSESATPESGPGSEPATSGSETPGTSESATPESGPGSEPATSGSETPGTSESATPESGPGTSTEPSEGSAPGSPAGSPTSTEEGTSESATPESGPGSEPATSGSETPGTSESATPESGPGSPAGSPTSTEEGSPAGSPTSTEEGTSTEPSEGSAPGTSESATPESGPGTSESATPESGPGTSESATPESGPGSEPATSGSETPGSEPATSGSETPGSPAGSPTSTEEGTSTEPSEGSAPGTSTEPSEGSAPGGSAPEAGRSANHTPAGLTGPATSGSETPGTDIQMTQSPSSLSASVGDRVTITCQASQDISNYLNWYQQKPGKAPKLLIYDASNLETGVPSRFSGSGSGTDFTFTISSLQPEDTATYFCQHFDHLPLAFGGGTKVEIKGATPPETGAETESPGETTGGSAESEPPGEGQVQLQESGPGAVKPSQTLSLTCTVSGGSVSSGDYYWTWIRQRPGKGLEWIGHIYYSGNTNYNPSLKSRLTISIDTSKTQFSLKLSSVTAADTATYYCVRDRVTGAFDIWGQGTAVTVSSGGGGSELVVTQEPSLTVSPGGTVTLTCRSSTGAVTTSNYANWVQQKPGQAPRGLIGGTNKRAPGTPARFSGSSLGGSAALTLSGVQPEDEAEYYCALWYSNLWVFGGGTKLTVLGATPPETGAETESPGETTGGSAESEPPGEGEVQLQESGGGLVQPGGSLKLSCAASGFTFNTYAMNWVRQAPGKGLEWVARIRSKYNNYATYYADSVKDRFTISRDDSKNTAYLQMNNLKTEDTAVYYCVRHGNFGNSYVSWFAYWGQGTLVTVSSGTAEAASASGEAGRSANHTPAGLTGPPGSPAGSPTSTEEGTSESATPESGPGTSTEPSEGSAPGSPAGSPTSTEEGTSTEPSEGSAPGTSTEPSEGSAPGTSESATPESGPGSEPATSGSETPGSEPATSGSETPGSPAGSPTSTEEGTSESATPESGPGTSTEPSEGSAPGTSTEPSEGSAPGSPAGSPTSTEEGTSTEPSEGSAPGTSTEPSEGSAPGTSESATPESGPGTSTEPSEGSAPGTSESATPESGPGSEPATSGSETPGTSTEPSEGSAPGTSTEPSEGSAPGTSESATPESGPGTSESATPESGPGSPAGSPTSTEEGTSESATPESGPGSEPATSGSETPGTSESATPESGPGTSTEPSEGSAPGTSTEPSEGSAPGTSTEPSEGSAPGTSTEPSEGSAPGTSTEPSEGSAPGTSTEPSEGSAPGSPAGSPTSTEEGTSTEPSEGSAPGTSESATPESGPGSEPATSGSETPGTSESATPESGPGSEPATSGSETPGTSESATPESGPGTSTEPSEGSAPGTSESATPESGPGSPAGSPTSTEEGSPAGSPTSTEEGSPAGSPTSTEEGTSESATPESGPGTSTEPSEGSAPGTSESATPESGPGSEPATSGSETPGTSESATPESGPGSEPATSGSETPGTSESATPESGPGTSTEPSEGSAPGSPAGSPTSTEEGTSESATPESGPGSEPATSGSETPGTSESATPESGPGSPAGSPTSTEEGSPAGSPTSTEEGTSTEPSEGSAPGTSESATPESGPGTSESATPESGPGTSESATPESGPGSEPATSGSETPGSEPATSGSETPGSPAGSPTSTEEGTSTEPSEGSAPGTSTEPSEGSAPGSEPATSGSETPGTSESATPESGPGTSTEPSEGAAEPEA

SEQ ID NO: 863 - protein, 1743 aa, Artificial Sequence
  Description of Artificial Sequence: Synthetic polypeptide
HHHHHHSPAGSPTSTEEGTSESATPESGPGTSTEPSEGSAPGTSESATPESGPGSEPATSGSETPGTSESATPESGPGSEPATSGSETPGTSESATPESGPGTSTEPSEGSAPGSPAGSPTSTEEGTSESATPESGPGSEPATSGSETPGTSESATPESGPGSPAGSPTSTEEGSPAGSPTSTEEGTSTEPSEGSAPGTSESATPESGPGTSESATPESGPGTSESATPESGPGSEPATSGSETPGSEPATSGSETPGSPAGSPTSTEEGTSTEPSEGSAPGTSTEPSEGSAPGGSAPEAGRSANHTPAGLTGPATSGSETPGTDIQMTQSPSSLSASVGDRVTITCQASQDISNYLNWYQQKPGKAPKLLIYDASNLETGVPSRFSGSGSGTDFTFTISSLQPEDTATYFCQHFDHLPLAFGGGTKVEIKGATPPETGAETESPGETTGGSAESEPPGEGQVQLQESGPGAVKPSQTLSLTCTVSGGSVSSGDYYWTWIRQRPGKGLEWIGHIYYSGNTNYNPSLKSRLTISIDTSKTQFSLKLSSVTAADTATYYCVRDRVTGAFDIWGQGTTVTVSSGGGGSELVVTQEPSLTVSPGGTVTLTCRSSTGAVTTSNYANWVQQKPGQAPRGLIGGTNKRAPGTPARFSGSSLGGSAALTLSGVQPEDEAEYYCALWYSNLWVFGGGTKLTVLGATPPETGAETESPGETTGGSAESEPPGEGEVQLQESGGGLVQPGGSLKLSCAASGFTFNTYAMNWVRQAPGKGLEWVARIRSKYNNYATYYADSVKDRFTISRDDSKNTAYLQMNNLKTEDTAVYYCVRHGNFGNSYVSWFAYWGQGTLVTVSSGTAEAASASGEAGRSANHTPAGLTGPPGSPAGSPTSTEEGTSESATPESGPGTSTEPSEGSAPGSPAGSPTSTEEGTSTEPSEGSAPGTSTEPSEGSAPGTSESATPESGPGSEPATSGSETPGSEPATSGSETPGSPAGSPTSTEEGTSESATPESGPGTSTEPSEGSAPGTSTEPSEGSAPGSPAGSPTSTEEGTSTEPSEGSAPGTSTEPSEGSAPGTSESATPESGPGTSTEPSEGSAPGTSESATPESGPGSEPATSGSETPGTSTEPSEGSAPGTSTEPSEGSAPGTSESATPESGPGTSESATPESGPGSPAGSPTSTEEGTSESATPESGPGSEPATSGSETPGTSESATPESGPGTSTEPSEGSAPGTSTEPSEGSAPGTSTEPSEGSAPGTSTEPSEGSAPGTSTEPSEGSAPGTSTEPSEGSAPGSPAGSPTSTEEGTSTEPSEGSAPGTSESATPESGPGSEPATSGSETPGTSESATPESGPGSEPATSGSETPGTSESATPESGPGTSTEPSEGSAPGTSESATPESGPGSPAGSPTSTEEGSPAGSPTSTEEGSPAGSPTSTEEGTSESATPESGPGTSTEPSEGSAPGTSESATPESGPGSEPATSGSETPGTSESATPESGPGSEPATSGSETPGTSESATPESGPGTSTEPSEGSAPGSPAGSPTSTEEGTSESATPESGPGSEPATSGSETPGTSESATPESGPGSPAGSPTSTEEGSPAGSPTSTEEGTSTEPSEGSAPGTSESATPESGPGTSESATPESGPGTSESATPESGPGSEPATSGSETPGSEPATSGSETPGSPAGSPTSTEEGTSTEPSEGSAPGTSTEPSEGSAPGSEPATSGSETPGTSESATPESGPGTSTEPSEGAAEPEA

SEQ ID NO: 864 - protein, 1743 aa, Artificial Sequence
  Description of Artificial Sequence: Synthetic polypeptide
HHHHHHSPAGSPTSTEEGTSESATPESGPGTSTEPSEGSAPGTSESATPESGPGSEPATSGSETPGTSESATPESGPGSEPATSGSETPGTSESATPESGPGTSTEPSEGSAPGSPAGSPTSTEEGTSESATPESGPGSEPATSGSETPGTSESATPESGPGSPAGSPTSTEEGSPAGSPTSTEEGTSTEPSEGSAPGTSESATPESGPGTSESATPESGPGTSESATPESGPGSEPATSGSETPGSEPATSGSETPGSPAGSPTSTEEGTSTEPSEGSAPGTSTEPSEGSAPGGSAPEAGRSANHTPAGLTGPATSGSETPGTDIQMTQSPSSLSASVGDRVTITCQASQDISNYLNWYQQKPGKAPKLLIYDASNLETGVPSRFSGSGSGTDFTFTISRLQPEDIATYFCQHFDHLPLAFGGGTKVEIKGATPPETGAETESPGETTGGSAESEPPGEGQVQLQESGPGAVKPSETLSLTCTVSGGSVSSGDYYWTWIRQSPGKGLEWIGHIYYSGNTNYNPSLKSRLTISIDTSKTQFSLKLSSVTAADTATYYCVRDRVTGAFDIWGQGTAVTVSSGGGGSELVVTQEPSLTVSPGGTVTLTCRSSTGAVTTSNYANWVQQKPGQAPRGLIGGTNKRAPGTPARFSGSSLGGSAALTLSGVQPEDEAEYYCALWYSNLWVFGGGTKLTVLGATPPETGAETESPGETTGGSAESEPPGEGEVQLQESGGGLVQPGGSLKLSCAASGFTFNTYAMNWVRQAPGKGLEWVARIRSKYNNYATYYADSVKDRFTISRDDSKNTAYLQMNNLKTEDTAVYYCVRHGNFGNSYVSWFAYWGQGTLVTVSSGTAEAASASGEAGRSANHTPAGLTGPPGSPAGSPTSTEEGTSESATPESGPGTSTEPSEGSAPGSPAGSPTSTEEGTSTEPSEGSAPGTSTEPSEGSAPGTSESATPESGPGSEPATSGSETPGSEPATSGSETPGSPAGSPTSTEEGTSESATPESGPGTSTEPSEGSAPGTSTEPSEGSAPGSPAGSPTSTEEGTSTEPSEGSAPGTSTEPSEGSAPGTSESATPESGPGTSTEPSEGSAPGTSESATPESGPGSEPATSGSETPGTSTEPSEGSAPGTSTEPSEGSAPGTSESATPESGPGTSESATPESGPGSPAGSPTSTEEGTSESATPESGPGSEPATSGSETPGTSESATPESGPGTSTEPSEGSAPGTSTEPSEGSAPGTSTEPSEGSAPGTSTEPSEGSAPGTSTEPSEGSAPGTSTEPSEGSAPGSPAGSPTSTEEGTSTEPSEGSAPGTSESATPESGPGSEPATSGSETPGTSESATPESGPGSEPATSGSETPGTSESATPESGPGTSTEPSEGSAPGTSESATPESGPGSPAGSPTSTEEGSPAGSPTSTEEGSPAGSPTSTEEGTSESATPESGPGTSTEPSEGSAPGTSESATPESGPGSEPATSGSETPGTSESATPESGPGSEPATSGSETPGTSESATPESGPGTSTEPSEGSAPGSPAGSPTSTEEGTSESATPESGPGSEPATSGSETPGTSESATPESGPGSPAGSPTSTEEGSPAGSPTSTEEGTSTEPSEGSAPGTSESATPESGPGTSESATPESGPGTSESATPESGPGSEPATSGSETPGSEPATSGSETPGSPAGSPTSTEEGTSTEPSEGSAPGTSTEPSEGSAPGSEPATSGSETPGTSESATPESGPGTSTEPSEGAAEPEA

SEQ ID NO: 865 - protein, 1743 aa, Artificial Sequence
  Description of Artificial Sequence: Synthetic polypeptide
HHHHHHSPAGSPTSTEEGTSESATPESGPGTSTEPSEGSAPGTSESATPESGPGSEPATSGSETPGTSESATPESGPGSEPATSGSETPGTSESATPESGPGTSTEPSEGSAPGSPAGSPTSTEEGTSESATPESGPGSEPATSGSETPGTSESATPESGPGSPAGSPTSTEEGSPAGSPTSTEEGTSTEPSEGSAPGTSESATPESGPGTSESATPESGPGTSESATPESGPGSEPATSGSETPGSEPATSGSETPGSPAGSPTSTEEGTSTEPSEGSAPGTSTEPSEGSAPGGSAPEAGRSANHTPAGLTGPATSGSETPGTDIQMTQSPSSLSASVGDRVTITCQASQDISNYLNWYQQKPGKAPKLLIYDASNLETGVPSRFSGSGSGTDFTFTISRLQPEDIATYFCQHFDHLPLAFGGGTKVEIKGATPPETGAETESPGETTGGSAESEPPGEGQVQLQESGPGAVKPSETLSLTCTVSGGSVSSGDYYWTWIRQSPGKGLEWIGHIYYSGNTNYNPSLKSRLTISIDTSKTQFSLKLSSVTAADTATYYCVRDRVTGAFDIWGQGTTVTVSSGGGGSELVVTQEPSLTVSPGGTVTLTCRSSTGAVTTSNYANWVQQKPGQAPRGLIGGTNKRAPGTPARFSGSSLGGSAALTLSGVQPEDEAEYYCALWYSNLWVFGGGTKLTVLGATPPETGAETESPGETTGGSAESEPPGEGEVQLQESGGGLVQPGGSLKLSCAASGFTFNTYAMNWVRQAPGKGLEWVARIRSKYNNYATYYADSVKDRFTISRDDSKNTAYLQMNNLKTEDTAVYYCVRHGNFGNSYVSWFAYWGQGTLVTVSSGTAEAASASGEAGRSANHTPAGLTGPPGSPAGSPTSTEEGTSESATPESGPGTSTEPSEGSAPGSPAGSPTSTEEGTSTEPSEGSAPGTSTEPSEGSAPGTSESATPESGPGSEPATSGSETPGSEPATSGSETPGSPAGSPTSTEEGTSESATPESGPGTSTEPSEGSAPGTSTEPSEGSAPGSPAGSPTSTEEGTSTEPSEGSAPGTSTEPSEGSAPGTSESATPESGPGTSTEPSEGSAPGTSESATPESGPGSEPATSGSETPGTSTEPSEGSAPGTSTEPSEGSAPGTSESATPESGPGTSESATPESGPGSPAGSPTSTEEGTSESATPESGPGSEPATSGSETPGTSESATPESGPGTSTEPSEGSAPGTSTEPSEGSAPGTSTEPSEGSAPGTSTEPSEGSAPGTSTEPSEGSAPGTSTEPSEGSAPGSPAGSPTSTEEGTSTEPSEGSAPGTSESATPESGPGSEPATSGSETPGTSESATPESGPGSEPATSGSETPGTSESATPESGPGTSTEPSEGSAPGTSESATPESGPGSPAGSPTSTEEGSPAGSPTSTEEGSPAGSPTSTEEGTSESATPESGPGTSTEPSEGSAPGTSESATPESGPGSEPATSGSETPGTSESATPESGPGSEPATSGSETPGTSESATPESGPGTSTEPSEGSAPGSPAGSPTSTEEGTSESATPESGPGSEPATSGSETPGTSESATPESGPGSPAGSPTSTEEGSPAGSPTSTEEGTSTEPSEGSAPGTSESATPESGPGTSESATPESGPGTSESATPESGPGSEPATSGSETPGSEPATSGSETPGSPAGSPTSTEEGTSTEPSEGSAPGTSTEPSEGSAPGSEPATSGSETPGTSESATPESGPGTSTEPSEGAAEPEA

SEQ ID NO: 866 - protein, 1743 aa, Artificial Sequence
  Description of Artificial Sequence: Synthetic polypeptide
HHHHHHSPAGSPTSTEEGTSESATPESGPGTSTEPSEGSAPGTSESATPESGPGSEPATSGSETPGTSESATPESGPGSEPATSGSETPGTSESATPESGPGTSTEPSEGSAPGSPAGSPTSTEEGTSESATPESGPGSEPATSGSETPGTSESATPESGPGSPAGSPTSTEEGSPAGSPTSTEEGTSTEPSEGSAPGTSESATPESGPGTSESATPESGPGTSESATPESGPGSEPATSGSETPGSEPATSGSETPGSPAGSPTSTEEGTSTEPSEGSAPGTSTEPSEGSAPGGSAPEAGRSANHTPAGLTGPATSGSETPGTDIQMTQSPSSLSASVGDRVTITCQASQDISNYLNWYQQKPGKAPKLLIYDASNLETGVPSRFSGSGSGTDFTFTISRLQPEDIATYFCQHFDHLPLAFGGGTKVEIKGATPPETGAETESPGETTGGSAESEPPGEGQVQLQESGPGLVKPSQTLSLTCTVSGGSVSSGDYYWTWIRQRPGKGLEWIGHIYYSGNTNYNPSLKSRLTISIDTSKTQFSLKLSSVTAADTAIYYCVRDRVTGAFDIWGQGTMVTVSSGGGGSELVVTQEPSLTVSPGGTVTLTCRSSTGAVTTSNYANWVQQKPGQAPRGLIGGTNKRAPGTPARFSGSSLGGSAALTLSGVQPEDEAEYYCALWYSNLWVFGGGTKLTVLGATPPETGAETESPGETTGGSAESEPPGEGEVQLQESGGGLVQPGGSLKLSCAASGFTFNTYAMNWVRQAPGKGLEWVARIRSKYNNYATYYADSVKDRFTISRDDSKNTAYLQMNNLKTEDTAVYYCVRHGNFGNSYVSWFAYWGQGTLVTVSSGTAEAASASGEAGRSANHTPAGLTGPPGSPAGSPTSTEEGTSESATPESGPGTSTEPSEGSAPGSPAGSPTSTEEGTSTEPSEGSAPGTSTEPSEGSAPGTSESATPESGPGSEPATSGSETPGSEPATSGSETPGSPAGSPTSTEEGTSESATPESGPGTSTEPSEGSAPGTSTEPSEGSAPGSPAGSPTSTEEGTSTEPSEGSAPGTSTEPSEGSAPGTSESATPESGPGTSTEPSEGSAPGTSESATPESGPGSEPATSGSETPGTSTEPSEGSAPGTSTEPSEGSAPGTSESATPESGPGTSESATPESGPGSPAGSPTSTEEGTSESATPESGPGSEPATSGSETPGTSESATPESGPGTSTEPSEGSAPGTSTEPSEGSAPGTSTEPSEGSAPGTSTEPSEGSAPGTSTEPSEGSAPGTSTEPSEGSAPGSPAGSPTSTEEGTSTEPSEGSAPGTSESATPESGPGSEPATSGSETPGTSESATPESGPGSEPATSGSETPGTSESATPESGPGTSTEPSEGSAPGTSESATPESGPGSPAGSPTSTEEGSPAGSPTSTEEGSPAGSPTSTEEGTSESATPESGPGTSTEPSEGSAPGTSESATPESGPGSEPATSGSETPGTSESATPESGPGSEPATSGSETPGTSESATPESGPGTSTEPSEGSAPGSPAGSPTSTEEGTSESATPESGPGSEPATSGSETPGTSESATPESGPGSPAGSPTSTEEGSPAGSPTSTEEGTSTEPSEGSAPGTSESATPESGPGTSESATPESGPGTSESATPESGPGSEPATSGSETPGSEPATSGSETPGSPAGSPTSTEEGTSTEPSEGSAPGTSTEPSEGSAPGSEPATSGSETPGTSESATPESGPGTSTEPSEGAAEPEA

SEQ ID NO: 867 - protein, 1743 aa, Artificial Sequence
  Description of Artificial Sequence: Synthetic polypeptide
HHHHHHSPAGSPTSTEEGTSESATPESGPGTSTEPSEGSAPGTSESATPESGPGSEPATSGSETPGTSESATPESGPGSEPATSGSETPGTSESATPESGPGTSTEPSEGSAPGSPAGSPTSTEEGTSESATPESGPGSEPATSGSETPGTSESATPESGPGSPAGSPTSTEEGSPAGSPTSTEEGTSTEPSEGSAPGTSESATPESGPGTSESATPESGPGTSESATPESGPGSEPATSGSETPGSEPATSGSETPGSPAGSPTSTEEGTSTEPSEGSAPGTSTEPSEGSAPGGSAPEAGRSANHTPAGLTGPATSGSETPGTDIQMTQSPSSLSASVGDRVTITCQASQDISNYLNWYQQKPGKAPKLLIYDASNLETGVPSRFSGSGSGTDFTFTISRLQPEDIATYFCQHFDHLPLAFGGGTKVEIKGATPPETGAETESPGETTGGSAESEPPGEGQVQLQESGPGAVKPSQTLSLTCTVSGGSVSSGDYYWTWIRQRPGKGLEWIGHIYYSGNTNYNPSLKSRLTISIDTSKTQFSLKLSSVTAADTATYYCVRDRVTGAFDIWGQGTAVTVSSGGGGSELVVTQEPSLTVSPGGTVTLTCRSSTGAVTTSNYANWVQQKPGQAPRGLIGGTNKRAPGTPARFSGSSLGGSAALTLSGVQPEDEAEYYCALWYSNLWVFGGGTKLTVLGATPPETGAETESPGETTGGSAESEPPGEGEVQLQESGGGLVQPGGSLKLSCAASGFTFNTYAMNWVRQAPGKGLEWVARIRSKYNNYATYYADSVKDRFTISRDDSKNTAYLQMNNLKTEDTAVYYCVRHGNFGNSYVSWFAYWGQGTLVTVSSGTAEAASASGEAGRSANHTPAGLTGPPGSPAGSPTSTEEGTSESATPESGPGTSTEPSEGSAPGSPAGSPTSTEEGTSTEPSEGSAPGTSTEPSEGSAPGTSESATPESGPGSEPATSGSETPGSEPATSGSETPGSPAGSPTSTEEGTSESATPESGPGTSTEPSEGSAPGTSTEPSEGSAPGSPAGSPTSTEEGTSTEPSEGSAPGTSTEPSEGSAPGTSESATPESGPGTSTEPSEGSAPGTSESATPESGPGSEPATSGSETPGTSTEPSEGSAPGTSTEPSEGSAPGTSESATPESGPGTSESATPESGPGSPAGSPTSTEEGTSESATPESGPGSEPATSGSETPGTSESATPESGPGTSTEPSEGSAPGTSTEPSEGSAPGTSTEPSEGSAPGTSTEPSEGSAPGTSTEPSEGSAPGTSTEPSEGSAPGSPAGSPTSTEEGTSTEPSEGSAPGTSESATPESGPGSEPATSGSETPGTSESATPESGPGSEPATSGSETPGTSESATPESGPGTSTEPSEGSAPGTSESATPESGPGSPAGSPTSTEEGSPAGSPTSTEEGSPAGSPTSTEEGTSESATPESGPGTSTEPSEGSAPGTSESATPESGPGSEPATSGSETPGTSESATPESGPGSEPATSGSETPGTSESATPESGPGTSTEPSEGSAPGSPAGSPTSTEEGTSESATPESGPGSEPATSGSETPGTSESATPESGPGSPAGSPTSTEEGSPAGSPTSTEEGTSTEPSEGSAPGTSESATPESGPGTSESATPESGPGTSESATPESGPGSEPATSGSETPGSEPATSGSETPGSPAGSPTSTEEGTSTEPSEGSAPGTSTEPSEGSAPGSEPATSGSETPGTSESATPESGPGTSTEPSEGAAEPEA

SEQ ID NO: 868 - protein, 1743 aa, Artificial Sequence
  Description of Artificial Sequence: Synthetic polypeptide
HHHHHHSPAGSPTSTEEGTSESATPESGPGTSTEPSEGSAPGTSESATPESGPGSEPATSGSETPGTSESATPESGPGSEPATSGSETPGTSESATPESGPGTSTEPSEGSAPGSPAGSPTSTEEGTSESATPESGPGSEPATSGSETPGTSESATPESGPGSPAGSPTSTEEGSPAGSPTSTEEGTSTEPSEGSAPGTSESATPESGPGTSESATPESGPGTSESATPESGPGSEPATSGSETPGSEPATSGSETPGSPAGSPTSTEEGTSTEPSEGSAPGTSTEPSEGSAPGGSAPEAGRSANHTPAGLTGPATSGSETPGTDIQMTQSPSSLSASVGDRVTITCQASQDISNYLNWYQQKPGKAPKLLIYDASNLETGVPSRFSGSGSGTDFTFTISRLQPEDIATYFCQHFDHLPLAFGGGTKVEIKGATPPETGAETESPGETTGGSAESEPPGEGQVQLQESGPGAVKPSQTLSLTCTVSGGSVSSGDYYWTWIRQRPGKGLEWIGHIYYSGNTNYNPSLKSRLTISIDTSKTQFSLKLSSVTAADTATYYCVRDRVTGAFDIWGQGTTVTVSSGGGGSELVVTQEPSLTVSPGGTVTLTCRSSTGAVTTSNYANWVQQKPGQAPRGLIGGTNKRAPGTPARFSGSSLGGSAALTLSGVQPEDEAEYYCALWYSNLWVFGGGTKLTVLGATPPETGAETESPGETTGGSAESEPPGEGEVQLQESGGGLVQPGGSLKLSCAASGFTFNTYAMNWVRQAPGKGLEWVARIRSKYNNYATYYADSVKDRFTISRDDSKNTAYLQMNNLKTEDTAVYYCVRHGNFGNSYVSWFAYWGQGTLVTVSSGTAEAASASGEAGRSANHTPAGLTGPPGSPAGSPTSTEEGTSESATPESGPGTSTEPSEGSAPGSPAGSPTSTEEGTSTEPSEGSAPGTSTEPSEGSAPGTSESATPESGPGSEPATSGSETPGSEPATSGSETPGSPAGSPTSTEEGTSESATPESGPGTSTEPSEGSAPGTSTEPSEGSAPGSPAGSPTSTEEGTSTEPSEGSAPGTSTEPSEGSAPGTSESATPESGPGTSTEPSEGSAPGTSESATPESGPGSEPATSGSETPGTSTEPSEGSAPGTSTEPSEGSAPGTSESATPESGPGTSESATPESGPGSPAGSPTSTEEGTSESATPESGPGSEPATSGSETPGTSESATPESGPGTSTEPSEGSAPGTSTEPSEGSAPGTSTEPSEGSAPGTSTEPSEGSAPGTSTEPSEGSAPGTSTEPSEGSAPGSPAGSPTSTEEGTSTEPSEGSAPGTSESATPESGPGSEPATSGSETPGTSESATPESGPGSEPATSGSETPGTSESATPESGPGTSTEPSEGSAPGTSESATPESGPGSPAGSPTSTEEGSPAGSPTSTEEGSPAGSPTSTEEGTSESATPESGPGTSTEPSEGSAPGTSESATPESGPGSEPATSGSETPGTSESATPESGPGSEPATSGSETPGTSESATPESGPGTSTEPSEGSAPGSPAGSPTSTEEGTSESATPESGPGSEPATSGSETPGTSESATPESGPGSPAGSPTSTEEGSPAGSPTSTEEGTSTEPSEGSAPGTSESATPESGPGTSESATPESGPGTSESATPESGPGSEPATSGSETPGSEPATSGSETPGSPAGSPTSTEEGTSTEPSEGSAPGTSTEPSEGSAPGSEPATSGSETPGTSESATPESGPGTSTEPSEGAAEPEA

SEQ ID NO: 869 - protein, 1743 aa, Artificial Sequence
  Description of Artificial Sequence: Synthetic polypeptide
HHHHHHSPAGSPTSTEEGTSESATPESGPGTSTEPSEGSAPGTSESATPESGPGSEPATSGSETPGTSESATPESGPGSEPATSGSETPGTSESATPESGPGTSTEPSEGSAPGSPAGSPTSTEEGTSESATPESGPGSEPATSGSETPGTSESATPESGPGSPAGSPTSTEEGSPAGSPTSTEEGTSTEPSEGSAPGTSESATPESGPGTSESATPESGPGTSESATPESGPGSEPATSGSETPGSEPATSGSETPGSPAGSPTSTEEGTSTEPSEGSAPGTSTEPSEGSAPGGSAPEAGRSANHTPAGLTGPATSGSETPGTDIQMTQSPSSLSASVGDRVTITCQASQDISNYLNWYQQKPGKAPKLLIYDASNLETGVPSRFSGSGSGTDFTFTISRLQPEDTATYFCQHFDHLPLAFGGGTKVEIKGATPPETGAETESPGETTGGSAESEPPGEGQVQLQESGPGAVKPSETLSLTCTVSGGSVSSGDYYWTWIRQSPGKGLEWIGHIYYSGNTNYNPSLKSRLTISIDTSKTQFSLKLSSVTAADTATYYCVRDRVTGAFDIWGQGTAVTVSSGGGGSELVVTQEPSLTVSPGGTVTLTCRSSTGAVTTSNYANWVQQKPGQAPRGLIGGTNKRAPGTPARFSGSSLGGSAALTLSGVQPEDEAEYYCALWYSNLWVFGGGTKLTVLGATPPETGAETESPGETTGGSAESEPPGEGEVQLQESGGGLVQPGGSLKLSCAASGFTFNTYAMNWVRQAPGKGLEWVARIRSKYNNYATYYADSVKDRFTISRDDSKNTAYLQMNNLKTEDTAVYYCVRHGNFGNSYVSWFAYWGQGTLVTVSSGTAEAASASGEAGRSANHTPAGLTGPPGSPAGSPTSTEEGTSESATPESGPGTSTEPSEGSAPGSPAGSPTSTEEGTSTEPSEGSAPGTSTEPSEGSAPGTSESATPESGPGSEPATSGSETPGSEPATSGSETPGSPAGSPTSTEEGTSESATPESGPGTSTEPSEGSAPGTSTEPSEGSAPGSPAGSPTSTEEGTSTEPSEGSAPGTSTEPSEGSAPGTSESATPESGPGTSTEPSEGSAPGTSESATPESGPGSEPATSGSETPGTSTEPSEGSAPGTSTEPSEGSAPGTSESATPESGPGTSESATPESGPGSPAGSPTSTEEGTSESATPESGPGSEPATSGSETPGTSESATPESGPGTSTEPSEGSAPGTSTEPSEGSAPGTSTEPSEGSAPGTSTEPSEGSAPGTSTEPSEGSAPGTSTEPSEGSAPGSPAGSPTSTEEGTSTEPSEGSAPGTSESATPESGPGSEPATSGSETPGTSESATPESGPGSEPATSGSETPGTSESATPESGPGTSTEPSEGSAPGTSESATPESGPGSPAGSPTSTEEGSPAGSPTSTEEGSPAGSPTSTEEGTSESATPESGPGTSTEPSEGSAPGTSESATPESGPGSEPATSGSETPGTSESATPESGPGSEPATSGSETPGTSESATPESGPGTSTEPSEGSAPGSPAGSPTSTEEGTSESATPESGPGSEPATSGSETPGTSESATPESGPGSPAGSPTSTEEGSPAGSPTSTEEGTSTEPSEGSAPGTSESATPESGPGTSESATPESGPGTSESATPESGPGSEPATSGSETPGSEPATSGSETPGSPAGSPTSTEEGTSTEPSEGSAPGTSTEPSEGSAPGSEPATSGSETPGTSESATPESGPGTSTEPSEGAAEPEA

SEQ ID NO: 870 - protein, 1743 aa, Artificial Sequence
  Description of Artificial Sequence: Synthetic polypeptide
HHHHHHSPAGSPTSTEEGTSESATPESGPGTSTEPSEGSAPGTSESATPESGPGSEPATSGSETPGTSESATPESGPGSEPATSGSETPGTSESATPESGPGTSTEPSEGSAPGSPAGSPTSTEEGTSESATPESGPGSEPATSGSETPGTSESATPESGPGSPAGSPTSTEEGSPAGSPTSTEEGTSTEPSEGSAPGTSESATPESGPGTSESATPESGPGTSESATPESGPGSEPATSGSETPGSEPATSGSETPGSPAGSPTSTEEGTSTEPSEGSAPGTSTEPSEGSAPGGSAPEAGRSANHTPAGLTGPATSGSETPGTDIQMTQSPSSLSASVGDRVTITCQASQDISNYLNWYQQKPGKAPKLLIYDASNLETGVPSRFSGSGSGTDFTFTISRLQPEDTATYFCQHFDHLPLAFGGGTKVEIKGATPPETGAETESPGETTGGSAESEPPGEGQVQLQESGPGAVKPSETLSLTCTVSGGSVSSGDYYWTWIRQSPGKGLEWIGHIYYSGNTNYNPSLKSRLTISIDTSKTQFSLKLSSVTAADTATYYCVRDRVTGAFDIWGQGTTVTVSSGGGGSELVVTQEPSLTVSPGGTVTLTCRSSTGAVTTSNYANWVQQKPGQAPRGLIGGTNKRAPGTPARFSGSSLGGSAALTLSGVQPEDEAEYYCALWYSNLWVFGGGTKLTVLGATPPETGAETESPGETTGGSAESEPPGEGEVQLQESGGGLVQPGGSLKLSCAASGFTFNTYAMNWVRQAPGKGLEWVARIRSKYNNYATYYADSVKDRFTISRDDSKNTAYLQMNNLKTEDTAVYYCVRHGNFGNSYVSWFAYWGQGTLVTVSSGTAEAASASGEAGRSANHTPAGLTGPPGSPAGSPTSTEEGTSESATPESGPGTSTEPSEGSAPGSPAGSPTSTEEGTSTEPSEGSAPGTSTEPSEGSAPGTSESATPESGPGSEPATSGSETPGSEPATSGSETPGSPAGSPTSTEEGTSESATPESGPGTSTEPSEGSAPGTSTEPSEGSAPGSPAGSPTSTEEGTSTEPSEGSAPGTSTEPSEGSAPGTSESATPESGPGTSTEPSEGSAPGTSESATPESGPGSEPATSGSETPGTSTEPSEGSAPGTSTEPSEGSAPGTSESATPESGPGTSESATPESGPGSPAGSPTSTEEGTSESATPESGPGSEPATSGSETPGTSESATPESGPGTSTEPSEGSAPGTSTEPSEGSAPGTSTEPSEGSAPGTSTEPSEGSAPGTSTEPSEGSAPGTSTEPSEGSAPGSPAGSPTSTEEGTSTEPSEGSAPGTSESATPESGPGSEPATSGSETPGTSESATPESGPGSEPATSGSETPGTSESATPESGPGTSTEPSEGSAPGTSESATPESGPGSPAGSPTSTEEGSPAGSPTSTEEGSPAGSPTSTEEGTSESATPESGPGTSTEPSEGSAPGTSESATPESGPGSEPATSGSETPGTSESATPESGPGSEPATSGSETPGTSESATPESGPGTSTEPSEGSAPGSPAGSPTSTEEGTSESATPESGPGSEPATSGSETPGTSESATPESGPGSPAGSPTSTEEGSPAGSPTSTEEGTSTEPSEGSAPGTSESATPESGPGTSESATPESGPGTSESATPESGPGSEPATSGSETPGSEPATSGSETPGSPAGSPTSTEEGTSTEPSEGSAPGTSTEPSEGSAPGSEPATSGSETPGTSESATPESGPGTSTEPSEGAAEPEA

SEQ ID NO: 871 - protein, 1743 aa, Artificial Sequence
  Description of Artificial Sequence: Synthetic polypeptide
HHHHHHSPAGSPTSTEEGTSESATPESGPGTSTEPSEGSAPGTSESATPESGPGSEPATSGSETPGTSESATPESGPGSEPATSGSETPGTSESATPESGPGTSTEPSEGSAPGSPAGSPTSTEEGTSESATPESGPGSEPATSGSETPGTSESATPESGPGSPAGSPTSTEEGSPAGSPTSTEEGTSTEPSEGSAPGTSESATPESGPGTSESATPESGPGTSESATPESGPGSEPATSGSETPGSEPATSGSETPGSPAGSPTSTEEGTSTEPSEGSAPGTSTEPSEGSAPGGSAPEAGRSANHTPAGLTGPATSGSETPGTDIQMTQSPSSLSASVGDRVTITCQASQDISNYLNWYQQKPGKAPKLLIYDASNLETGVPSRFSGSGSGTDFTFTISRLQPEDTATYFCQHFDHLPLAFGGGTKVEIKGATPPETGAETESPGETTGGSAESEPPGEGQVQLQESGPGLVKPSQTLSLTCTVSGGSVSSGDYYWTWIRQRPGKGLEWIGHIYYSGNTNYNPSLKSRLTISIDTSKTQFSLKLSSVTAADTAIYYCVRDRVTGAFDIWGQGTMVTVSSGGGGSELVVTQEPSLTVSPGGTVTLTCRSSTGAVTTSNYANWVQQKPGQAPRGLIGGTNKRAPGTPARFSGSSLGGSAALTLSGVQPEDEAEYYCALWYSNLWVFGGGTKLTVLGATPPETGAETESPGETTGGSAESEPPGEGEVQLQESGGGLVQPGGSLKLSCAASGFTFNTYAMNWVRQAPGKGLEWVARIRSKYNNYATYYADSVKDRFTISRDDSKNTAYLQMNNLKTEDTAVYYCVRHGNFGNSYVSWFAYWGQGTLVTVSSGTAEAASASGEAGRSANHTPAGLTGPPGSPAGSPTSTEEGTSESATPESGPGTSTEPSEGSAPGSPAGSPTSTEEGTSTEPSEGSAPGTSTEPSEGSAPGTSESATPESGPGSEPATSGSETPGSEPATSGSETPGSPAGSPTSTEEGTSESATPESGPGTSTEPSEGSAPGTSTEPSEGSAPGSPAGSPTSTEEGTSTEPSEGSAPGTSTEPSEGSAPGTSESATPESGPGTSTEPSEGSAPGTSESATPESGPGSEPATSGSETPGTSTEPSEGSAPGTSTEPSEGSAPGTSESATPESGPGTSESATPESGPGSPAGSPTSTEEGTSESATPESGPGSEPATSGSETPGTSESATPESGPGTSTEPSEGSAPGTSTEPSEGSAPGTSTEPSEGSAPGTSTEPSEGSAPGTSTEPSEGSAPGTSTEPSEGSAPGSPAGSPTSTEEGTSTEPSEGSAPGTSESATPESGPGSEPATSGSETPGTSESATPESGPGSEPATSGSETPGTSESATPESGPGTSTEPSEGSAPGTSESATPESGPGSPAGSPTSTEEGSPAGSPTSTEEGSPAGSPTSTEEGTSESATPESGPGTSTEPSEGSAPGTSESATPESGPGSEPATSGSETPGTSESATPESGPGSEPATSGSETPGTSESATPESGPGTSTEPSEGSAPGSPAGSPTSTEEGTSESATPESGPGSEPATSGSETPGTSESATPESGPGSPAGSPTSTEEGSPAGSPTSTEEGTSTEPSEGSAPGTSESATPESGPGTSESATPESGPGTSESATPESGPGSEPATSGSETPGSEPATSGSETPGSPAGSPTSTEEGTSTEPSEGSAPGTSTEPSEGSAPGSEPATSGSETPGTSESATPESGPGTSTEPSEGAAEPEA

SEQ ID NO: 872 - protein, 1743 aa, Artificial Sequence
  Description of Artificial Sequence: Synthetic polypeptide
HHHHHHSPAGSPTSTEEGTSESATPESGPGTSTEPSEGSAPGTSESATPESGPGSEPATSGSETPGTSESATPESGPGSEPATSGSETPGTSESATPESGPGTSTEPSEGSAPGSPAGSPTSTEEGTSESATPESGPGSEPATSGSETPGTSESATPESGPGSPAGSPTSTEEGSPAGSPTSTEEGTSTEPSEGSAPGTSESATPESGPGTSESATPESGPGTSESATPESGPGSEPATSGSETPGSEPATSGSETPGSPAGSPTSTEEGTSTEPSEGSAPGTSTEPSEGSAPGGSAPEAGRSANHTPAGLTGPATSGSETPGTDIQMTQSPSSLSASVGDRVTITCQASQDISNYLNWYQQKPGKAPKLLIYDASNLETGVPSRFSGSGSGTDFTFTISRLQPEDTATYFCQHFDHLPLAFGGGTKVEIKGATPPETGAETESPGETTGGSAESEPPGEGQVQLQESGPGAVKPSQTLSLTCTVSGGSVSSGDYYWTWIRQRPGKGLEWIGHIYYSGNTNYNPSLKSRLTISIDTSKTQFSLKLSSVTAADTATYYCVRDRVTGAFDIWGQGTAVTVSSGGGGSELVVTQEPSLTVSPGGTVTLTCRSSTGAVTTSNYANWVQQKPGQAPRGLIGGTNKRAPGTPARFSGSSLGGSAALTLSGVQPEDEAEYYCALWYSNLWVFGGGTKLTVLGATPPETGAETESPGETTGGSAESEPPGEGEVQLQESGGGLVQPGGSLKLSCAASGFTFNTYAMNWVRQAPGKGLEWVARIRSKYNNYATYYADSVKDRFTISRDDSKNTAYLQMNNLKTEDTAVYYCVRHGNFGNSYVSWFAYWGQGTLVTVSSGTAEAASASGEAGRSANHTPAGLTGPPGSPAGSPTSTEEGTSESATPESGPGTSTEPSEGSAPGSPAGSPTSTEEGTSTEPSEGSAPGTSTEPSEGSAPGTSESATPESGPGSEPATSGSETPGSEPATSGSETPGSPAGSPTSTEEGTSESATPESGPGTSTEPSEGSAPGTSTEPSEGSAPGSPAGSPTSTEEGTSTEPSEGSAPGTSTEPSEGSAPGTSESATPESGPGTSTEPSEGSAPGTSESATPESGPGSEPATSGSETPGTSTEPSEGSAPGTSTEPSEGSAPGTSESATPESGPGTSESATPESGPGSPAGSPTSTEEGTSESATPESGPGSEPATSGSETPGTSESATPESGPGTSTEPSEGSAPGTSTEPSEGSAPGTSTEPSEGSAPGTSTEPSEGSAPGTSTEPSEGSAPGTSTEPSEGSAPGSPAGSPTSTEEGTSTEPSEGSAPGTSESATPESGPGSEPATSGSETPGTSESATPESGPGSEPATSGSETPGTSESATPESGPGTSTEPSEGSAPGTSESATPESGPGSPAGSPTSTEEGSPAGSPTSTEEGSPAGSPTSTEEGTSESATPESGPGTSTEPSEGSAPGTSESATPESGPGSEPATSGSETPGTSESATPESGPGSEPATSGSETPGTSESATPESGPGTSTEPSEGSAPGSPAGSPTSTEEGTSESATPESGPGSEPATSGSETPGTSESATPESGPGSPAGSPTSTEEGSPAGSPTSTEEGTSTEPSEGSAPGTSESATPESGPGTSESATPESGPGTSESATPESGPGSEPATSGSETPGSEPATSGSETPGSPAGSPTSTEEGTSTEPSEGSAPGTSTEPSEGSAPGSEPATSGSETPGTSESATPESGPGTSTEPSEGAAEPEA

SEQ ID NO: 873 - protein, 1743 aa, Artificial Sequence
  Description of Artificial Sequence: Synthetic polypeptide
HHHHHHSPAGSPTSTEEGTSESATPESGPGTSTEPSEGSAPGTSESATPESGPGSEPATSGSETPGTSESATPESGPGSEPATSGSETPGTSESATPESGPGTSTEPSEGSAPGSPAGSPTSTEEGTSESATPESGPGSEPATSGSETPGTSESATPESGPGSPAGSPTSTEEGSPAGSPTSTEEGTSTEPSEGSAPGTSESATPESGPGTSESATPESGPGTSESATPESGPGSEPATSGSETPGSEPATSGSETPGSPAGSPTSTEEGTSTEPSEGSAPGTSTEPSEGSAPGGSAPEAGRSANHTPAGLTGPATSGSETPGTDIQMTQSPSSLSASVGDRVTITCQASQDISNYLNWYQQKPGKAPKLLIYDASNLETGVPSRFSGSGSGTDFTFTISRLQPEDTATYFCQHFDHLPLAFGGGTKVEIKGATPPETGAETESPGETTGGSAESEPPGEGQVQLQESGPGAVKPSQTLSLTCTVSGGSVSSGDYYWTWIRQRPGKGLEWIGHIYYSGNTNYNPSLKSRLTISIDTSKTQFSLKLSSVTAADTATYYCVRDRVTGAFDIWGQGTTVTVSSGGGGSELVVTQEPSLTVSPGGTVTLTCRSSTGAVTTSNYANWVQQKPGQAPRGLIGGTNKRAPGTPARFSGSSLGGSAALTLSGVQPEDEAEYYCALWYSNLWVFGGGTKLTVLGATPPETGAETESPGETTGGSAESEPPGEGEVQLQESGGGLVQPGGSLKLSCAASGFTFNTYAMNWVRQAPGKGLEWVARIRSKYNNYATYYADSVKDRFTISRDDSKNTAYLQMNNLKTEDTAVYYCVRHGNFGNSYVSWFAYWGQGTLVTVSSGTAEAASASGEAGRSANHTPAGLTGPPGSPAGSPTSTEEGTSESATPESGPGTSTEPSEGSAPGSPAGSPTSTEEGTSTEPSEGSAPGTSTEPSEGSAPGTSESATPESGPGSEPATSGSETPGSEPATSGSETPGSPAGSPTSTEEGTSESATPESGPGTSTEPSEGSAPGTSTEPSEGSAPGSPAGSPTSTEEGTSTEPSEGSAPGTSTEPSEGSAPGTSESATPESGPGTSTEPSEGSAPGTSESATPESGPGSEPATSGSETPGTSTEPSEGSAPGTSTEPSEGSAPGTSESATPESGPGTSESATPESGPGSPAGSPTSTEEGTSESATPESGPGSEPATSGSETPGTSESATPESGPGTSTEPSEGSAPGTSTEPSEGSAPGTSTEPSEGSAPGTSTEPSEGSAPGTSTEPSEGSAPGTSTEPSEGSAPGSPAGSPTSTEEGTSTEPSEGSAPGTSESATPESGPGSEPATSGSETPGTSESATPESGPGSEPATSGSETPGTSESATPESGPGTSTEPSEGSAPGTSESATPESGPGSPAGSPTSTEEGSPAGSPTSTEEGSPAGSPTSTEEGTSESATPESGPGTSTEPSEGSAPGTSESATPESGPGSEPATSGSETPGTSESATPESGPGSEPATSGSETPGTSESATPESGPGTSTEPSEGSAPGSPAGSPTSTEEGTSESATPESGPGSEPATSGSETPGTSESATPESGPGSPAGSPTSTEEGSPAGSPTSTEEGTSTEPSEGSAPGTSESATPESGPGTSESATPESGPGTSESATPESGPGSEPATSGSETPGSEPATSGSETPGSPAGSPTSTEEGTSTEPSEGSAPGTSTEPSEGSAPGSEPATSGSETPGTSESATPESGPGTSTEPSEGAAEPEA

SEQ ID NO: 874 - protein, 1420 aa, Artificial Sequence
  Description of Artificial Sequence: Synthetic polypeptide
DIQMTQSPSSLSASVGDRVTITCRSTKSLLHSNGITYLYWYQQKPGKAPKLLIYQMSNLASGVPSRFSSSGSGTDFTLTISSLQPEDFATYYCAQNLEIPRTFGQGTKVEIKGATPPETGAETESPGETTGGSAESEPPGEGQVQLVQSGPGLVQPGGSVRISCAASGYTFTNYGMNWVKQAPGKGLEWMGWINTYTGESTYADSFKGRFTFSLDTSASAAYLQINSLRAEDTAVYYCARFAIKGDYWGQGTLLTVSSGGGGSDIQMTQSPSSLSASVGDRVTITCRASQDIRNYLNWYQQKPGKAPKLLIYYTSRLESGVPSRFSGSGSGTDYTLTISSLQPEDFATYYCQQGNTLPWTFGQGTKVEIKGATPPETGAETESPGETTGGSAESEPPGEGEVQLVESGGGLVQPGGSLRLSCAASGYSFTGYTMNWVRQAPGKGLEWVALINPYKGVSTYNQKFKDRFTISVDKSKNTAYLQMNSLRAEDTAVYYCARSGYYGDSDWYFDVWGQGTLVTVSSGTAEAASASGLSGRSDNHSPLGLAGSPGSPAGSPTSTEEGTSESATPESGPGTSTEPSEGSAPGSPAGSPTSTEEGTSTEPSEGSAPGTSTEPSEGSAPGTSESATPESGPGSEPATSGSETPGSEPATSGSETPGSPAGSPTSTEEGTSESATPESGPGTSTEPSEGSAPGTSTEPSEGSAPGSPAGSPTSTEEGTSTEPSEGSAPGTSTEPSEGSAPGTSESATPESGPGTSTEPSEGSAPGTSESATPESGPGSEPATSGSETPGTSTEPSEGSAPGTSTEPSEGSAPGTSESATPESGPGTSESATPESGPGSPAGSPTSTEEGTSESATPESGPGSEPATSGSETPGTSESATPESGPGTSTEPSEGSAPGTSTEPSEGSAPGTSTEPSEGSAPGTSTEPSEGSAPGTSTEPSEGSAPGTSTEPSEGSAPGSPAGSPTSTEEGTSTEPSEGSAPGTSESATPESGPGSEPATSGSETPGTSESATPESGPGSEPATSGSETPGTSESATPESGPGTSTEPSEGSAPGTSESATPESGPGSPAGSPTSTEEGSPAGSPTSTEEGSPAGSPTSTEEGTSESATPESGPGTSTEPSEGSAPGTSESATPESGPGSEPATSGSETPGTSESATPESGPGSEPATSGSETPGTSESATPESGPGTSTEPSEGSAPGSPAGSPTSTEEGTSESATPESGPGSEPATSGSETPGTSESATPESGPGSPAGSPTSTEEGSPAGSPTSTEEGTSTEPSEGSAPGTSESATPESGPGTSESATPESGPGTSESATPESGPGSEPATSGSETPGSEPATSGSETPGSPAGSPTSTEEGTSTEPSEGSAPGTSTEPSEGSAPGSEPATSGSETPGTSESATPESGPGTSTEPSEGSAPGHHHHHH

SEQ ID NO: 875 - protein, 1420 aa, Artificial Sequence; identical to SEQ ID NO: 874
  Description of Artificial Sequence: Synthetic polypeptide

SEQ ID NO: 876 - protein, 1420 aa, Artificial Sequence
  Description of Artificial Sequence: Synthetic polypeptide
DIQMTQSPSSLSASVGDRVTITCRSTKSLLHSNGITYLYWYQQKPGKAPKLLIYQMSNLASGVPSRFSSSGSGTDFTLTISSLQPEDFATYYCAQNLEIPRTFGQGTKVEIKGATPPETGAETESPGETTGGSAESEPPGEGQVQLVQSGPGLVQPGGSVRISCAASGYTFTNYGMNWVKQAPGKGLEWMGWINTYTGESTYADSFKGRFTFSLDTSASAAYLQINSLRAEDTAVYYCARFAIKGDYWGQGTLLTVSSGGGGSDIQMTQSPSSLSASVGDRVTITCRASQDIRNYLNWYQQKPGKAPKLLIYYTSRLESGVPSRFSGSGSGTDYTLTISSLQPEDFATYYCQQGNTLPWTFGQGTKVEIKGATPPETGAETESPGETTGGSAESEPPGEGEVQLVESGGGLVQPGGSLRLSCAASGYSFTGYTMNWVRQAPGKGLEWVALINPYKGVSTYNQKFKDRFTISVDKSKNTAYLQMNSLRAEDTAVYYCARSGYYGDSDWYFDVWGQGTLVTVSSGTAEAASASGESGRAANTAPEGLTGPPGSPAGSPTSTEEGTSESATPESGPGTSTEPSEGSAPGSPAGSPTSTEEGTSTEPSEGSAPGTSTEPSEGSAPGTSESATPESGPGSEPATSGSETPGSEPATSGSETPGSPAGSPTSTEEGTSESATPESGPGTSTEPSEGSAPGTSTEPSEGSAPGSPAGSPTSTEEGTSTEPSEGSAPGTSTEPSEGSAPGTSESATPESGPGTSTEPSEGSAPGTSESATPESGPGSEPATSGSETPGTSTEPSEGSAPGTSTEPSEGSAPGTSESATPESGPGTSESATPESGPGSPAGSPTSTEEGTSESATPESGPGSEPATSGSETPGTSESATPESGPGTSTEPSEGSAPGTSTEPSEGSAPGTSTEPSEGSAPGTSTEPSEGSAPGTSTEPSEGSAPGTSTEPSEGSAPGSPAGSPTSTEEGTSTEPSEGSAPGTSESATPESGPGSEPATSGSETPGTSESATPESGPGSEPATSGSETPGTSESATPESGPGTSTEPSEGSAPGTSESATPESGPGSPAGSPTSTEEGSPAGSPTSTEEGSPAGSPTSTEEGTSESATPESGPGTSTEPSEGSAPGTSESATPESGPGSEPATSGSETPGTSESATPESGPGSEPATSGSETPGTSESATPESGPGTSTEPSEGSAPGSPAGSPTSTEEGTSESATPESGPGSEPATSGSETPGTSESATPESGPGSPAGSPTSTEEGSPAGSPTSTEEGTSTEPSEGSAPGTSESATPESGPGTSESATPESGPGTSESATPESGPGSEPATSGSETPGSEPATSGSETPGSPAGSPTSTEEGTSTEPSEGSAPGTSTEPSEGSAPGSEPATSGSETPGTSESATPESGPGTSTEPSEGSAPGHHHHHH

SEQ ID NO: 877 - protein, 1743 aa, Artificial Sequence
  Description of Artificial Sequence: Synthetic polypeptide
HHHHHHSPAGSPTSTEEGTSESATPESGPGTSTEPSEGSAPGTSESATPESGPGSEPATSGSETPGTSESATPESGPGSEPATSGSETPGTSESATPESGPGTSTEPSEGSAPGSPAGSPTSTEEGTSESATPESGPGSEPATSGSETPGTSESATPESGPGSPAGSPTSTEEGSPAGSPTSTEEGTSTEPSEGSAPGTSESATPESGPGTSESATPESGPGTSESATPESGPGSEPATSGSETPGSEPATSGSETPGSPAGSPTSTEEGTSTEPSEGSAPGTSTEPSEGSAPGGSAPEAGRSANHTPAGLTGPATSGSETPGTDIQMTQSPSSLSASVGDRVTITCQASQDISNYLNWYQQKPGKAPKLLIYDASNLETGVPSRFSGSGSGTDFTFTISSLQPEDIATYFCQHFDHLPLAFGGGTKVEIKGATPPETGAETESPGETTGGSAESEPPGEGQVQLQESGPGLVKPSETLSLTCTVSGGSVSSGDYYWTWIRQSPGKGLEWIGHIYYSGNTNYNPSLKSRLTISIDTSKTQFSLKLSSVTAADTAIYYCVRDRVTGAFDIWGQGTMVTVSSGGGGSELVVTQEPSLTVSPGGTVTLTCRSSTGAVTTSNYANWVQQKPGQAPRGLIGGTNKRAPGTPARFSGSSLGGSAALTLSGVQPEDEAEYYCALWYSNLWVFGGGTKLTVLGATPPETGAETESPGETTGGSAESEPPGEGEVQLQESGGGLVQPGGSLKLSCAASGFTFNTYAMNWVRQAPGKGLEWVARIRSKYNNYATYYADSVKDRFTISRDDSKNTAYLQMNNLKTEDTAVYYCVRHGNFGNSYVSWFAYWGQGTLVTVSSGTAEAASASGEAGRSANHTPAGLTGPPGSPAGSPTSTEEGTSESATPESGPGTSTEPSEGSAPGSPAGSPTSTEEGTSTEPSEGSAPGTSTEPSEGSAPGTSESATPESGPGSEPATSGSETPGSEPATSGSETPGSPAGSPTSTEEGTSESATPESGPGTSTEPSEGSAPGTSTEPSEGSAPGSPAGSPTSTEEGTSTEPSEGSAPGTSTEPSEGSAPGTSESATPESGPGTSTEPSEGSAPGTSESATPESGPGSEPATSGSETPGTSTEPSEGSAPGTSTEPSEGSAPGTSESATPESGPGTSESATPESGPGSPAGSPTSTEEGTSESATPESGPGSEPATSGSETPGTSESATPESGPGTSTEPSEGSAPGTSTEPSEGSAPGTSTEPSEGSAPGTSTEPSEGSAPGTSTEPSEGSAPGTSTEPSEGSAPGSPAGSPTSTEEGTSTEPSEGSAPGTSESATPESGPGSEPATSGSETPGTSESATPESGPGSEPATSGSETPGTSESATPESGPGTSTEPSEGSAPGTSESATPESGPGSPAGSPTSTEEGSPAGSPTSTEEGSPAGSPTSTEEGTSESATPESGPGTSTEPSEGSAPGTSESATPESGPGSEPATSGSETPGTSESATPESGPGSEPATSGSETPGTSESATPESGPGTSTEPSEGSAPGSPAGSPTSTEEGTSESATPESGPGSEPATSGSETPGTSESATPESGPGSPAGSPTSTEEGSPAGSPTSTEEGTSTEPSEGSAPGTSESATPESGPGTSESATPESGPGTSESATPESGPGSEPATSGSETPGSEPATSGSETPGSPAGSPTSTEEGTSTEPSEGSAPGTSTEPSEGSAPGSEPATSGSETPGTSESATPESGPGTSTEPSEGAAEPEA

SEQ ID NO: 878 - protein, 1749 aa, Artificial Sequence
  Description of Artificial Sequence: Synthetic polypeptide
HHHHHHSPAGSPTSTEEGTSESATPESGPGTSTEPSEGSAPGTSESATPESGPGSEPATSGSETPGTSESATPESGPGSEPATSGSETPGTSESATPESGPGTSTEPSEGSAPGSPAGSPTSTEEGTSESATPESGPGSEPATSGSETPGTSESATPESGPGSPAGSPTSTEEGSPAGSPTSTEEGTSTEPSEGSAPGTSESATPESGPGTSESATPESGPGTSESATPESGPGSEPATSGSETPGSEPATSGSETPGSPAGSPTSTEEGTSTEPSEGSAPGTSTEPSEGSAPGGSAPTTGEAGEAAGATSAGATGPATSGSETPGTDIQMTQSPSSLSASVGDRVTITCQASQDISNYLNWYQQKPGKAPKLLIYDASNLETGVPSRFSGSGSGTDFTFTISSLQPEDIATYFCQHFDHLPLAFGGGTKVEIKGATPPETGAETESPGETTGGSAESEPPGEGQVQLQESGPGLVKPSETLSLTCTVSGGSVSSGDYYWTWIRQSPGKGLEWIGHIYYSGNTNYNPSLKSRLTISIDTSKTQFSLKLSSVTAADTAIYYCVRDRVTGAFDIWGQGTMVTVSSGGGGSELVVTQEPSLTVSPGGTVTLTCRSSTGAVTTSNYANWVQQKPGQAPRGLIGGTNKRAPGTPARFSGSLLGGKAALTLSGVQPEDEAEYYCALWYSNLWVFGGGTKLTVLGATPPETGAETESPGETTGGSAESEPPGEGEVQLLESGGGLVQPGGSLKLSCAASGFTFNTYAMNWVRQAPGKGLEWVARIRSKYNNYATYYADSVKDRFTISRDDSKNTAYLQMNNLKTEDTAVYYCVRHGNFGNSYVSWFAYWGQGTLVTVSSGTAEAASASGTTGEAGEAAGATSAGATGPPGSPAGSPTSTEEGTSESATPESGPGTSTEPSEGSAPGSPAGSPTSTEEGTSTEPSEGSAPGTSTEPSEGSAPGTSESATPESGPGSEPATSGSETPGSEPATSGSETPGSPAGSPTSTEEGTSESATPESGPGTSTEPSEGSAPGTSTEPSEGSAPGSPAGSPTSTEEGTSTEPSEGSAPGTSTEPSEGSAPGTSESATPESGPGTSTEPSEGSAPGTSESATPESGPGSEPATSGSETPGTSTEPSEGSAPGTSTEPSEGSAPGTSESATPESGPGTSESATPESGPGSPAGSPTSTEEGTSESATPESGPGSEPATSGSETPGTSESATPESGPGTSTEPSEGSAPGTSTEPSEGSAPGTSTEPSEGSAPGTSTEPSEGSAPGTSTEPSEGSAPGTSTEPSEGSAPGSPAGSPTSTEEGTSTEPSEGSAPGTSESATPESGPGSEPATSGSETPGTSESATPESGPGSEPATSGSETPGTSESATPESGPGTSTEPSEGSAPGTSESATPESGPGSPAGSPTSTEEGSPAGSPTSTEEGSPAGSPTSTEEGTSESATPESGPGTSTEPSEGSAPGTSESATPESGPGSEPATSGSETPGTSESATPESGPGSEPATSGSETPGTSESATPESGPGTSTEPSEGSAPGSPAGSPTSTEEGTSESATPESGPGSEPATSGSETPGTSESATPESGPGSPAGSPTSTEEGSPAGSPTSTEEGTSTEPSEGSAPGTSESATPESGPGTSESATPESGPGTSESATPESGPGSEPATSGSETPGSEPATSGSETPGSPAGSPTSTEEGTSTEPSEGSAPGTSTEPSEGSAPGSEPATSGSETPGTSESATPESGPGTSTEPSEGAAEPEA

SEQ ID NO: 879 - protein, 1743 aa, Artificial Sequence
  Description of Artificial Sequence: Synthetic polypeptide
HHHHHHSPAGSPTSTEEGTSESATPESGPGTSTEPSEGSAPGTSESATPESGPGSEPATSGSETPGTSESATPESGPGSEPATSGSETPGTSESATPESGPGTSTEPSEGSAPGSPAGSPTSTEEGTSESATPESGPGSEPATSGSETPGTSESATPESGPGSPAGSPTSTEEGSPAGSPTSTEEGTSTEPSEGSAPGTSESATPESGPGTSESATPESGPGTSESATPESGPGSEPATSGSETPGSEPATSGSETPGSPAGSPTSTEEGTSTEPSEGSAPGTSTEPSEGSAPGGSAPEAGRSANHTPAGLTGPATSGSETPGTDIQMTQSPSSLSASVGDRVTITCQASQDISNYLNWYQQKPGKAPKLLIYDASNLETGVPSRFSGSGSGTDFTFTISSLQPEDIATYFCQHFDHLPLAFGGGTKVEIKGATPPETGAETESPGETTGGSAESEPPGEGQVQLQESGPGLVKPSETLSLTCTVSGGSVSSGDYYWTWIRQSPGKGLEWIGHIYYSGNTNYNPSLKSRLTISIDTSKTQFSLKLSSVTAADTAIYYCVRDRVTGAFDIWGQGTMVTVSSGGGGSELVVTQEPSLTVSPGGTVTLTCRSSNGEVTTSNYANWVQQKPGQAPRGLIGGTIKRAPGTPARFSGSLLGGKAALTLSGVQPEDEAVYYCALWYPNLWVFGGGTKLTVLGATPPETGAETESPGETTGGSAESEPPGEGEVQLLESGGGIVQPGGSLKLSCAASGFTFNTYAMNWVRQAPGKGLEWVARIRSKYNNYATYYADSVKDRFTISRDDSKNTVYLQMNNLKTEDTAVYYCVRHENFGNSYVSWFAHWGQGTLVTVSSGTAEAASASGEAGRSANHTPAGLTGPPGSPAGSPTSTEEGTSESATPESGPGTSTEPSEGSAPGSPAGSPTSTEEGTSTEPSEGSAPGTSTEPSEGSAPGTSESATPESGPGSEPATSGSETPGSEPATSGSETPGSPAGSPTSTEEGTSESATPESGPGTSTEPSEGSAPGTSTEPSEGSAPGSPAGSPTSTEEGTSTEPSEGSAPGTSTEPSEGSAPGTSESATPESGPGTSTEPSEGSAPGTSESATPESGPGSEPATSGSETPGTSTEPSEGSAPGTSTEPSEGSAPGTSESATPESGPGTSESATPESGPGSPAGSPTSTEEGTSESATPESGPGSEPATSGSETPGTSESATPESGPGTSTEPSEGSAPGTSTEPSEGSAPGTSTEPSEGSAPGTSTEPSEGSAPGTSTEPSEGSAPGTSTEPSEGSAPGSPAGSPTSTEEGTSTEPSEGSAPGTSESATPESGPGSEPATSGSETPGTSESATPESGPGSEPATSGSETPGTSESATPESGPGTSTEPSEGSAPGTSESATPESGPGSPAGSPTSTEEGSPAGSPTSTEEGSPAGSPTSTEEGTSESATPESGPGTSTEPSEGSAPGTSESATPESGPGSEPATSGSETPGTSESATPESGPGSEPATSGSETPGTSESATPESGPGTSTEPSEGSAPGSPAGSPTSTEEGTSESATPESGPGSEPATSGSETPGTSESATPESGPGSPAGSPTSTEEGSPAGSPTSTEEGTSTEPSEGSAPGTSESATPESGPGTSESATPESGPGTSESATPESGPGSEPATSGSETPGSEPATSGSETPGSPAGSPTSTEEGTSTEPSEGSAPGTSTEPSEGSAPGSEPATSGSETPGTSESATPESGPGTSTEPSEGAAEPEA

SEQ ID NO: 880 - protein, 1743 aa, Artificial Sequence
  Description of Artificial Sequence: Synthetic polypeptide
HHHHHHSPAGSPTSTEEGTSESATPESGPGTSTEPSEGSAPGTSESATPESGPGSEPATSGSETPGTSESATPESGPGSEPATSGSETPGTSESATPESGPGTSTEPSEGSAPGSPAGSPTSTEEGTSESATPESGPGSEPATSGSETPGTSESATPESGPGSPAGSPTSTEEGSPAGSPTSTEEGTSTEPSEGSAPGTSESATPESGPGTSESATPESGPGTSESATPESGPGSEPATSGSETPGSEPATSGSETPGSPAGSPTSTEEGTSTEPSEGSAPGTSTEPSEGSAPGGSAPEAGRSANHTPAGLTGPATSGSETPGTDIQMTQSPSSLSASVGDRVTITCQASQDISNYLNWYQQKPGKAPKLLIYDASNLETGVPSRFSGSGSGTDFTFTISSLQPEDIATYFCQHFDHLPLAFGGGTKVEIKGATPPETGAETESPGETTGGSAESEPPGEGQVQLQESGPGLVKPSETLSLTCTVSGGSVSSGDYYWTWIRQSPGKGLEWIGHIYYSGNTNYNPSLKSRLTISIDTSKTQFSLKLSSVTAADTAIYYCVRDRVTGAFDIWGQGTMVTVSSGGGGSELVVTQEPSHTVSPGGTVTLTCRSSTGAVTSSNYANWVQQKPGQAPRGLIGGTIKRAPGTPARFSGSLLGGKAALTLSGVQPEDEAEYYCALWYPNLWVFGGGTKLTVLGATPPETGAETESPGETTGGSAESEPPGEGEVQLLESGGGIVQPGGSLKLSCAASGFTFNTYAMNWVRQAPGKGLEWVARIRSKYNNYATYYADSVKDRFTISRDDSKNTVYLQMNNLKTEDTAVYYCVRHENFGNSYVSWFAHWGQGTLVTVSSGTAEAASASGEAGRSANHTPAGLTGPPGSPAGSPTSTEEGTSESATPESGPGTSTEPSEGSAPGSPAGSPTSTEEGTSTEPSEGSAPGTSTEPSEGSAPGTSESATPESGPGSEPATSGSETPGSEPATSGSETPGSPAGSPTSTEEGTSESATPESGPGTSTEPSEGSAPGTSTEPSEGSAPGSPAGSPTSTEEGTSTEPSEGSAPGTSTEPSEGSAPGTSESATPESGPGTSTEPSEGSAPGTSESATPESGPGSEPATSGSETPGTSTEPSEGSAPGTSTEPSEGSAPGTSESATPESGPGTSESATPESGPGSPAGSPTSTEEGTSESATPESGPGSEPATSGSETPGTSESATPESGPGTSTEPSEGSAPGTSTEPSEGSAPGTSTEPSEGSAPGTSTEPSEGSAPGTSTEPSEGSAPGTSTEPSEGSAPGSPAGSPTSTEEGTSTEPSEGSAPGTSESATPESGPGSEPATSGSETPGTSESATPESGPGSEPATSGSETPGTSESATPESGPGTSTEPSEGSAPGTSESATPESGPGSPAGSPTSTEEGSPAGSPTSTEEGSPAGSPTSTEEGTSESATPESGPGTSTEPSEGSAPGTSESATPESGPGSEPATSGSETPGTSESATPESGPGSEPATSGSETPGTSESATPESGPGTSTEPSEGSAPGSPAGSPTSTEEGTSESATPESGPGSEPATSGSETPGTSESATPESGPGSPAGSPTSTEEGSPAGSPTSTEEGTSTEPSEGSAPGTSESATPESGPGTSESATPESGPGTSESATPESGPGSEPATSGSETPGSEPATSGSETPGSPAGSPTSTEEGTSTEPSEGSAPGTSTEPSEGSAPGSEPATSGSETPGTSESATPESGPGTSTEPSEGAAEPEA

SEQ ID NO: 881 - protein, 1743 aa, Artificial Sequence
  Description of Artificial Sequence: Synthetic polypeptide
HHHHHHSPAGSPTSTEEGTSESATPESGPGTSTEPSEGSAPGTSESATPESGPGSEPATSGSETPGTSESATPESGPGSEPATSGSETPGTSESATPESGPGTSTEPSEGSAPGSPAGSPTSTEEGTSESATPESGPGSEPATSGSETPGTSESATPESGPGSPAGSPTSTEEGSPAGSPTSTEEGTSTEPSEGSAPGTSESATPESGPGTSESATPESGPGTSESATPESGPGSEPATSGSETPGSEPATSGSETPGSPAGSPTSTEEGTSTEPSEGSAPGTSTEPSEGSAPGGSAPEAGRSANHTPAGLTGPATSGSETPGTDIQMTQSPSSLSASVGDRVTITCQASQDISNYLNWYQQKPGKAPKLLIYDASNLETGVPSRFSGSGSGTDFTFTISSLQPEDIATYFCQHFDHLPLAFGGGTKVEIKGATPPETGAETESPGETTGGSAESEPPGEGQVQLQESGPGLVKPSETLSLTCTVSGGSVSSGDYYWTWIRQSPGKGLEWIGHIYYSGNTNYNPSLKSRLTISIDTSKTQFSLKLSSVTAADTAIYYCVRDRVTGAFDIWGQGTMVTVSSGGGGSELVVTQEPSHTVSPGGTVTLTCRSSTGEVTTSNYANWVQQKPGQAPRGLIGGTIKRAPGTPARFSGSLLGGKAALTLSGVQPEDEAEYYCALWYPNLWVFGGGTKLTVLGATPPETGAETESPGETTGGSAESEPPGEGEVQLLESGGGIVQPGGSLKLSCAASGFTFNTYAMNWVRQAPGKGLEWVARIRSKYNNYATYYADSVKDRFTISRDDSKNTVYLQMNNLKTEDTAVYYCVRHENFGNSYVSWFAHWGQGTLVTVSSGTAEAASASGEAGRSANHTPAGLTGPPGSPAGSPTSTEEGTSESATPESGPGTSTEPSEGSAPGSPAGSPTSTEEGTSTEPSEGSAPGTSTEPSEGSAPGTSESATPESGPGSEPATSGSETPGSEPATSGSETPGSPAGSPTSTEEGTSESATPESGPGTSTEPSEGSAPGTSTEPSEGSAPGSPAGSPTSTEEGTSTEPSEGSAPGTSTEPSEGSAPGTSESATPESGPGTSTEPSEGSAPGTSESATPESGPGSEPATSGSETPGTSTEPSEGSAPGTSTEPSEGSAPGTSESATPESGPGTSESATPESGPGSPAGSPTSTEEGTSESATPESGPGSEPATSGSETPGTSESATPESGPGTSTEPSEGSAPGTSTEPSEGSAPGTSTEPSEGSAPGTSTEPSEGSAPGTSTEPSEGSAPGTSTEPSEGSAPGSPAGSPTSTEEGTSTEPSEGSAPGTSESATPESGPGSEPATSGSETPGTSESATPESGPGSEPATSGSETPGTSESATPESGPGTSTEPSEGSAPGTSESATPESGPGSPAGSPTSTEEGSPAGSPTSTEEGSPAGSPTSTEEGTSESATPESGPGTSTEPSEGSAPGTSESATPESGPGSEPATSGSETPGTSESATPESGPGSEPATSGSETPGTSESATPESGPGTSTEPSEGSAPGSPAGSPTSTEEGTSESATPESGPGSEPATSGSETPGTSESATPESGPGSPAGSPTSTEEGSPAGSPTSTEEGTSTEPSEGSAPGTSESATPESGPGTSESATPESGPGTSESATPESGPGSEPATSGSETPGSEPATSGSETPGSPAGSPTSTEEGTSTEPSEGSAPGTSTEPSEGSAPGSEPATSGSETPGTSESATPESGPGTSTEPSEGAAEPEA

SEQ ID NO: 882 - protein, 1743 aa, Artificial Sequence
  Description of Artificial Sequence: Synthetic polypeptide
HHHHHHSPAGSPTSTEEGTSESATPESGPGTSTEPSEGSAPGTSESATPESGPGSEPATSGSETPGTSESATPESGPGSEPATSGSETPGTSESATPESGPGTSTEPSEGSAPGSPAGSPTSTEEGTSESATPESGPGSEPATSGSETPGTSESATPESGPGSPAGSPTSTEEGSPAGSPTSTEEGTSTEPSEGSAPGTSESATPESGPGTSESATPESGPGTSESATPESGPGSEPATSGSETPGSEPATSGSETPGSPAGSPTSTEEGTSTEPSEGSAPGTSTEPSEGSAPGGSAPEAGRSANHTPAGLTGPATSGSETPGTDIQMTQSPSSLSASVGDRVTITCQASQDISNYLNWYQQKPGKAPKLLIYDASNLETGVPSRFSGSGSGTDFTFTISSLQPEDIATYFCQHFDHLPLAFGGGTKVEIKGATPPETGAETESPGETTGGSAESEPPGEGQVQLQESGPGLVKPSETLSLTCTVSGGSVSSGDYYWTWIRQSPGKGLEWIGHIYYSGNTNYNPSLKSRLTISIDTSKTQFSLKLSSVTAADTAIYYCVRDRVTGAFDIWGQGTMVTVSSGGGGSELVVTQEPSLTVSPGGTVTLTCRSSNGAVTSSNYANWVQQKPGQAPRGLIGGTNKRAPGTPARFSGSSLGGKAALTLSGVQPEDEAVYYCALWYPNLWVFGGGTKLTVLGATPPETGAETESPGETTGGSAESEPPGEGEVQLQESGGGIVQPGGSLKLSCAASGFTFNTYAMNWVRQAPGKGLEWVARIRSKYNNYATYYADSVKDRFTISRDDSKNTVYLQMNNLKTEDTAVYYCVRHENFGNSYVSWFAHWGQGTLVTVSSGTAEAASASGEAGRSANHTPAGLTGPPGSPAGSPTSTEEGTSESATPESGPGTSTEPSEGSAPGSPAGSPTSTEEGTSTEPSEGSAPGTSTEPSEGSAPGTSESATPESGPGSEPATSGSETPGSEPATSGSETPGSPAGSPTSTEEGTSESATPESGPGTSTEPSEGSAPGTSTEPSEGSAPGSPAGSPTSTEEGTSTEPSEGSAPGTSTEPSEGSAPGTSESATPESGPGTSTEPSEGSAPGTSESATPESGPGSEPATSGSETPGTSTEPSEGSAPGTSTEPSEGSAPGTSESATPESGPGTSESATPESGPGSPAGSPTSTEEGTSESATPESGPGSEPATSGSETPGTSESATPESGPGTSTEPSEGSAPGTSTEPSEGSAPGTSTEPSEGSAPGTSTEPSEGSAPGTSTEPSEGSAPGTSTEPSEGSAPGSPAGSPTSTEEGTSTEPSEGSAPGTSESATPESGPGSEPATSGSETPGTSESATPESGPGSEPATSGSETPGTSESATPESGPGTSTEPSEGSAPGTSESATPESGPGSPAGSPTSTEEGSPAGSPTSTEEGSPAGSPTSTEEGTSESATPESGPGTSTEPSEGSAPGTSESATPESGPGSEPATSGSETPGTSESATPESGPGSEPATSGSETPGTSESATPESGPGTSTEPSEGSAPGSPAGSPTSTEEGTSESATPESGPGSEPATSGSETPGTSESATPESGPGSPAGSPTSTEEGSPAGSPTSTEEGTSTEPSEGSAPGTSESATPESGPGTSESATPESGPGTSESATPESGPGSEPATSGSETPGSEPATSGSETPGSPAGSPTSTEEGTSTEPSEGSAPGTSTEPSEGSAPGSEPATSGSETPGTSESATPESGPGTSTEPSEGAAEPEA

SEQ ID NO: 883 - protein, 1743 aa, Artificial Sequence
  Description of Artificial Sequence: Synthetic polypeptide
HHHHHHSPAGSPTSTEEGTSESATPESGPGTSTEPSEGSAPGTSESATPESGPGSEPATSGSETPGTSESATPESGPGSEPATSGSETPGTSESATPESGPGTSTEPSEGSAPGSPAGSPTSTEEGTSESATPESGPGSEPATSGSETPGTSESATPESGPGSPAGSPTSTEEGSPAGSPTSTEEGTSTEPSEGSAPGTSESATPESGPGTSESATPESGPGTSESATPESGPGSEPATSGSETPGSEPATSGSETPGSPAGSPTSTEEGTSTEPSEGSAPGTSTEPSEGSAPGGSAPEAGRSANHTPAGLTGPATSGSETPGTDIQMTQSPSSLSASVGDRVTITCQASQDISNYLNWYQQKPGKAPKLLIYDASNLETGVPSRFSGSGSGTDFTFTISSLQPEDIATYFCQHFDHLPLAFGGGTKVEIKGATPPETGAETESPGETTGGSAESEPPGEGQVQLQESGPGLVKPSETLSLTCTVSGGSVSSGDYYWTWIRQSPGKGLEWIGHIYYSGNTNYNPSLKSRLTISIDTSKTQFSLKLSSVTAADTAIYYCVRDRVTGAFDIWGQGTMVTVSSGGGGSELVVTQEPSLTVSPGGTVTLTCRSSNGAVTSSNYANWVQQKPGQAPRGLIGGTNKRAPGTPARFSGSLLGGSAALTLSGVQPEDEAVYYCALWYPNLWVFGGGTKLTVLGATPPETGAETESPGETTGGSAESEPPGEGEVQLQESGGGIVQPGGSLKLSCAASGFTFNTYAMNWVRQAPGKGLEWVARIRSKYNNYATYYADSVKDRFTISRDDSKNTVYLQMNNLKTEDTAVYYCVRHENFGNSYVSWFAHWGQGTLVTVSSGTAEAASASGEAGRSANHTPAGLTGPPGSPAGSPTSTEEGTSESATPESGPGTSTEPSEGSAPGSPAGSPTSTEEGTSTEPSEGSAPGTSTEPSEGSAPGTSESATPESGPGSEPATSGSETPGSEPATSGSETPGSPAGSPTSTEEGTSESATPESGPGTSTEPSEGSAPGTSTEPSEGSAPGSPAGSPTSTEEGTSTEPSEGSAPGTSTEPSEGSAPGTSESATPESGPGTSTEPSEGSAPGTSESATPESGPGSEPATSGSETPGTSTEPSEGSAPGTSTEPSEGSAPGTSESATPESGPGTSESATPESGPGSPAGSPTSTEEGTSESATPESGPGSEPATSGSETPGTSESATPESGPGTSTEPSEGSAPGTSTEPSEGSAPGTSTEPSEGSAPGTSTEPSEGSAPGTSTEPSEGSAPGTSTEPSEGSAPGSPAGSPTSTEEGTSTEPSEGSAPGTSESATPESGPGSEPATSGSETPGTSESATPESGPGSEPATSGSETPGTSESATPESGPGTSTEPSEGSAPGTSESATPESGPGSPAGSPTSTEEGSPAGSPTSTEEGSPAGSPTSTEEGTSESATPESGPGTSTEPSEGSAPGTSESATPESGPGSEPATSGSETPGTSESATPESGPGSEPATSGSETPGTSESATPESGPGTSTEPSEGSAPGSPAGSPTSTEEGTSESATPESGPGSEPATSGSETPGTSESATPESGPGSPAGSPTSTEEGSPAGSPTSTEEGTSTEPSEGSAPGTSESATPESGPGTSESATPESGPGTSESATPESGPGSEPATSGSETPGSEPATSGSETPGSPAGSPTSTEEGTSTEPSEGSAPGTSTEPSEGSAPGSEPATSGSETPGTSESATPESGPGTSTEPSEGAAEPEA

SEQ ID NO: 884 - protein, 1743 aa, Artificial Sequence
  Description of Artificial Sequence: Synthetic polypeptide
HHHHHHSPAGSPTSTEEGTSESATPESGPGTSTEPSEGSAPGTSESATPESGPGSEPATSGSETPGTSESATPESGPGSEPATSGSETPGTSESATPESGPGTSTEPSEGSAPGSPAGSPTSTEEGTSESATPESGPGSEPATSGSETPGTSESATPESGPGSPAGSPTSTEEGSPAGSPTSTEEGTSTEPSEGSAPGTSESATPESGPGTSESATPESGPGTSESATPESGPGSEPATSGSETPGSEPATSGSETPGSPAGSPTSTEEGTSTEPSEGSAPGTSTEPSEGSAPGGSAPEAGRSANHTPAGLTGPATSGSETPGTDIQMTQSPSSLSASVGDRVTITCQASQDISNYLNWYQQKPGKAPKLLIYDASNLETGVPSRFSGSGSGTDFTFTISRLQPEDTATYFCQHFDHLPLAFGGGTKVEIKGATPPETGAETESPGETTGGSAESEPPGEGQVQLQESGPGAVKPSETLSLTCTVSGGSVSSGDYYWTWIRQSPGKGLEWIGHIYYSGNTNYNPSLKSRLTISIDTSKTQFSLKLSSVTAADTATYYCVRDRVTGAFDIWGQGTAVTVSSGGGGSELVVTQEPSLTVSPGGTVTLTCRSSNGAVTSSNYANWVQQKPGQAPRGLIGGTNKRAPGTPARFSGSLLGGKAALTLSGVQPEDEAVYYCALWYPNLWVFGGGTKLTVLGATPPETGAETESPGETTGGSAESEPPGEGEVQLLESGGGIVQPGGSLKLSCAASGFTFNTYAMNWVRQAPGKGLEWVARIRSKYNNYATYYADSVKDRFTISRDDSKNTVYLQMNNLKTEDTAVYYCVRHENFGNSYVSWFAHWGQGTLVTVSSGTAEAASASGEAGRSANHTPAGLTGPPGSPAGSPTSTEEGTSESATPESGPGTSTEPSEGSAPGSPAGSPTSTEEGTSTEPSEGSAPGTSTEPSEGSAPGTSESATPESGPGSEPATSGSETPGSEPATSGSETPGSPAGSPTSTEEGTSESATPESGPGTSTEPSEGSAPGTSTEPSEGSAPGSPAGSPTSTEEGTSTEPSEGSAPGTSTEPSEGSAPGTSESATPESGPGTSTEPSEGSAPGTSESATPESGPGSEPATSGSETPGTSTEPSEGSAPGTSTEPSEGSAPGTSESATPESGPGTSESATPESGPGSPAGSPTSTEEGTSESATPESGPGSEPATSGSETPGTSESATPESGPGTSTEPSEGSAPGTSTEPSEGSAPGTSTEPSEGSAPGTSTEPSEGSAPGTSTEPSEGSAPGTSTEPSEGSAPGSPAGSPTSTEEGTSTEPSEGSAPGTSESATPESGPGSEPATSGSETPGTSESATPESGPGSEPATSGSETPGTSESATPESGPGTSTEPSEGSAPGTSESATPESGPGSPAGSPTSTEEGSPAGSPTSTEEGSPAGSPTSTEEGTSESATPESGPGTSTEPSEGSAPGTSESATPESGPGSEPATSGSETPGTSESATPESGPGSEPATSGSETPGTSESATPESGPGTSTEPSEGSAPGSPAGSPTSTEEGTSESATPESGPGSEPATSGSETPGTSESATPESGPGSPAGSPTSTEEGSPAGSPTSTEEGTSTEPSEGSAPGTSESATPESGPGTSESATPESGPGTSESATPESGPGSEPATSGSETPGSEPATSGSETPGSPAGSPTSTEEGTSTEPSEGSAPGTSTEPSEGSAPGSEPATSGSETPGTSESATPESGPGTSTEPSEGAAEPEA

SEQ ID NO: 885 - protein, 1743 aa, Artificial Sequence
  Description of Artificial Sequence: Synthetic polypeptide
HHHHHHSPAGSPTSTEEGTSESATPESGPGTSTEPSEGSAPGTSESATPESGPGSEPATSGSETPGTSESATPESGPGSEPATSGSETPGTSESATPESGPGTSTEPSEGSAPGSPAGSPTSTEEGTSESATPESGPGSEPATSGSETPGTSESATPESGPGSPAGSPTSTEEGSPAGSPTSTEEGTSTEPSEGSAPGTSESATPESGPGTSESATPESGPGTSESATPESGPGSEPATSGSETPGSEPATSGSETPGSPAGSPTSTEEGTSTEPSEGSAPGTSTEPSEGSAPGGSAPEAGRSANHTPAGLTGPATSGSETPGTDIQMTQSPSSLSASVGDRVTITCQASQDISNYLNWYQQKPGKAPKLLIYDASNLETGVPSRFSGSGSGTDFTFTISRLQPEDTATYFCQHFDHLPLAFGGGTKVEIKGATPPETGAETESPGETTGGSAESEPPGEGQVQLQESGPGAVKPSETLSLTCTVSGGSVSSGDYYWTWIRQSPGKGLEWIGHIYYSGNTNYNPSLKSRLTISIDTSKTQFSLKLSSVTAADTATYYCVRDRVTGAFDIWGQGTAVTVSSGGGGSELVVTQEPSLTVSPGGTVTLTCRSSNGEVTTSNYANWVQQKPGQAPRGLIGGTIKRAPGTPARFSGSLLGGKAALTLSGVQPEDEAVYYCALWYPNLWVFGGGTKLTVLGATPPETGAETESPGETTGGSAESEPPGEGEVQLLESGGGIVQPGGSLKLSCAASGFTFNTYAMNWVRQAPGKGLEWVARIRSKYNNYATYYADSVKDRFTISRDDSKNTVYLQMNNLKTEDTAVYYCVRHENFGNSYVSWFAHWGQGTLVTVSSGTAEAASASGEAGRSANHTPAGLTGPPGSPAGSPTSTEEGTSESATPESGPGTSTEPSEGSAPGSPAGSPTSTEEGTSTEPSEGSAPGTSTEPSEGSAPGTSESATPESGPGSEPATSGSETPGSEPATSGSETPGSPAGSPTSTEEGTSESATPESGPGTSTEPSEGSAPGTSTEPSEGSAPGSPAGSPTSTEEGTSTEPSEGSAPGTSTEPSEGSAPGTSESATPESGPGTSTEPSEGSAPGTSESATPESGPGSEPATSGSETPGTSTEPSEGSAPGTSTEPSEGSAPGTSESATPESGPGTSESATPESGPGSPAGSPTSTEEGTSESATPESGPGSEPATSGSETPGTSESATPESGPGTSTEPSEGSAPGTSTEPSEGSAPGTSTEPSEGSAPGTSTEPSEGSAPGTSTEPSEGSAPGTSTEPSEGSAPGSPAGSPTSTEEGTSTEPSEGSAPGTSESATPESGPGSEPATSGSETPGTSESATPESGPGSEPATSGSETPGTSESATPESGPGTSTEPSEGSAPGTSESATPESGPGSPAGSPTSTEEGSPAGSPTSTEEGSPAGSPTSTEEGTSESATPESGPGTSTEPSEGSAPGTSESATPESGPGSEPATSGSETPGTSESATPESGPGSEPATSGSETPGTSESATPESGPGTSTEPSEGSAPGSPAGSPTSTEEGTSESATPESGPGSEPATSGSETPGTSESATPESGPGSPAGSPTSTEEGSPAGSPTSTEEGTSTEPSEGSAPGTSESATPESGPGTSESATPESGPGTSESATPESGPGSEPATSGSETPGSEPATSGSETPGSPAGSPTSTEEGTSTEPSEGSAPGTSTEPSEGSAPGSEPATSGSETPGTSESATPESGPGTSTEPSEGAAEPEA

SEQ ID NO: 886 - protein, 1743 aa, Artificial Sequence
  Description of Artificial Sequence: Synthetic polypeptide
HHHHHHSPAGSPTSTEEGTSESATPESGPGTSTEPSEGSAPGTSESATPESGPGSEPATSGSETPGTSESATPESGPGSEPATSGSETPGTSESATPESGPGTSTEPSEGSAPGSPAGSPTSTEEGTSESATPESGPGSEPATSGSETPGTSESATPESGPGSPAGSPTSTEEGSPAGSPTSTEEGTSTEPSEGSAPGTSESATPESGPGTSESATPESGPGTSESATPESGPGSEPATSGSETPGSEPATSGSETPGSPAGSPTSTEEGTSTEPSEGSAPGTSTEPSEGSAPGGSAPEAGRSANHTPAGLTGPATSGSETPGTDIQMTQSPSSLSASVGDRVTITCQASQDISNYLNWYQQKPGKAPKLLIYDASNLETGVPSRFSGSGSGTDFTFTISRLQPEDTATYFCQHFDHLPLAFGGGTKVEIKGATPPETGAETESPGETTGGSAESEPPGEGQVQLQESGPGAVKPSETLSLTCTVSGGSVSSGDYYWTWIRQSPGKGLEWIGHIYYSGNTNYNPSLKSRLTISIDTSKTQFSLKLSSVTAADTATYYCVRDRVTGAFDIWGQGTAVTVSSGGGGSELVVTQEPSHTVSPGGTVTLTCRSSTGAVTSSNYANWVQQKPGQAPRGLIGGTIKRAPGTPARFSGSLLGGKAALTLSGVQPEDEAEYYCALWYPNLWVFGGGTKLTVLGATPPETGAETESPGETTGGSAESEPPGEGEVQLLESGGGIVQPGGSLKLSCAASGFTFNTYAMNWVRQAPGKGLEWVARIRSKYNNYATYYADSVKDRFTISRDDSKNTVYLQMNNLKTEDTAVYYCVRHENFGNSYVSWFAHWGQGTLVTVSSGTAEAASASGEAGRSANHTPAGLTGPPGSPAGSPTSTEEGTSESATPESGPGTSTEPSEGSAPGSPAGSPTSTEEGTSTEPSEGSAPGTSTEPSEGSAPGTSESATPESGPGSEPATSGSETPGSEPATSGSETPGSPAGSPTSTEEGTSESATPESGPGTSTEPSEGSAPGTSTEPSEGSAPGSPAGSPTSTEEGTSTEPSEGSAPGTSTEPSEGSAPGTSESATPESGPGTSTEPSEGSAPGTSESATPESGPGSEPATSGSETPGTSTEPSEGSAPGTSTEPSEGSAPGTSESATPESGPGTSESATPESGPGSPAGSPTSTEEGTSESATPESGPGSEPATSGSETPGTSESATPESGPGTSTEPSEGSAPGTSTEPSEGSAPGTSTEPSEGSAPGTSTEPSEGSAPGTSTEPSEGSAPGTSTEPSEGSAPGSPAGSPTSTEEGTSTEPSEGSAPGTSESATPESGPGSEPATSGSETPGTSESATPESGPGSEPATSGSETPGTSESATPESGPGTSTEPSEGSAPGTSESATPESGPGSPAGSPTSTEEGSPAGSPTSTEEGSPAGSPTSTEEGTSESATPESGPGTSTEPSEGSAPGTSESATPESGPGSEPATSGSETPGTSESATPESGPGSEPATSGSETPGTSESATPESGPGTSTEPSEGSAPGSPAGSPTSTEEGTSESATPESGPGSEPATSGSETPGTSESATPESGPGSPAGSPTSTEEGSPAGSPTSTEEGTSTEPSEGSAPGTSESATPESGPGTSESATPESGPGTSESATPESGPGSEPATSGSETPGSEPATSGSETPGSPAGSPTSTEEGTSTEPSEGSAPGTSTEPSEGSAPGSEPATSGSETPGTSESATPESGPGTSTEPSEGAAEPEA

SEQ ID NO: 887 - protein, 1743 aa, Artificial Sequence
  Description of Artificial Sequence: Synthetic polypeptide
HHHHHHSPAGSPTSTEEGTSESATPESGPGTSTEPSEGSAPGTSESATPESGPGSEPATSGSETPGTSESATPESGPGSEPATSGSETPGTSESATPESGPGTSTEPSEGSAPGSPAGSPTSTEEGTSESATPESGPGSEPATSGSETPGTSESATPESGPGSPAGSPTSTEEGSPAGSPTSTEEGTSTEPSEGSAPGTSESATPESGPGTSESATPESGPGTSESATPESGPGSEPATSGSETPGSEPATSGSETPGSPAGSPTSTEEGTSTEPSEGSAPGTSTEPSEGSAPGGSAPEAGRSANHTPAGLTGPATSGSETPGTDIQMTQSPSSLSASVGDRVTITCQASQDISNYLNWYQQKPGKAPKLLIYDASNLETGVPSRFSGSGSGTDFTFTISRLQPEDTATYFCQHFDHLPLAFGGGTKVEIKGATPPETGAETESPGETTGGSAESEPPGEGQVQLQESGPGAVKPSETLSLTCTVSGGSVSSGDYYWTWIRQSPGKGLEWIGHIYYSGNTNYNPSLKSRLTISIDTSKTQFSLKLSSVTAADTATYYCVRDRVTGAFDIWGQGTAVTVSSGGGGSELVVTQEPSHTVSPGGTVTLTCRSSTGEVTTSNYANWVQQKPGQAPRGLIGGTIKRAPGTPARFSGSLLGGKAALTLSGVQPEDEAEYYCALWYPNLWVFGGGTKLTVLGATPPETGAETESPGETTGGSAESEPPGEGEVQLLESGGGIVQPGGSLKLSCAASGFTFNTYAMNWVRQAPGKGLEWVARIRSKYNNYATYYADSVKDRFTISRDDSKNTVYLQMNNLKTEDTAVYYCVRHENFGNSYVSWFAHWGQGTLVTVSSGTAEAASASGEAGRSANHTPAGLTGPPGSPAGSPTSTEEGTSESATPESGPGTSTEPSEGSAPGSPAGSPTSTEEGTSTEPSEGSAPGTSTEPSEGSAPGTSESATPESGPGSEPATSGSETPGSEPATSGSETPGSPAGSPTSTEEGTSESATPESGPGTSTEPSEGSAPGTSTEPSEGSAPGSPAGSPTSTEEGTSTEPSEGSAPGTSTEPSEGSAPGTSESATPESGPGTSTEPSEGSAPGTSESATPESGPGSEPATSGSETPGTSTEPSEGSAPGTSTEPSEGSAPGTSESATPESGPGTSESATPESGPGSPAGSPTSTEEGTSESATPESGPGSEPATSGSETPGTSESATPESGPGTSTEPSEGSAPGTSTEPSEGSAPGTSTEPSEGSAPGTSTEPSEGSAPGTSTEPSEGSAPGTSTEPSEGSAPGSPAGSPTSTEEGTSTEPSEGSAPGTSESATPESGPGSEPATSGSETPGTSESATPESGPGSEPATSGSETPGTSESATPESGPGTSTEPSEGSAPGTSESATPESGPGSPAGSPTSTEEGSPAGSPTSTEEGSPAGSPTSTEEGTSESATPESGPGTSTEPSEGSAPGTSESATPESGPGSEPATSGSETPGTSESATPESGPGSEPATSGSETPGTSESATPESGPGTSTEPSEGSAPGSPAGSPTSTEEGTSESATPESGPGSEPATSGSETPGTSESATPESGPGSPAGSPTSTEEGSPAGSPTSTEEGTSTEPSEGSAPGTSESATPESGPGTSESATPESGPGTSESATPESGPGSEPATSGSETPGSEPATSGSETPGSPAGSPTSTEEGTSTEPSEGSAPGTSTEPSEGSAPGSEPATSGSETPGTSESATPESGPGTSTEPSEGAAEPEA

SEQ ID NO: 888 - protein, 1743 aa, Artificial Sequence
  Description of Artificial Sequence: Synthetic polypeptide
HHHHHHSPAGSPTSTEEGTSESATPESGPGTSTEPSEGSAPGTSESATPESGPGSEPATSGSETPGTSESATPESGPGSEPATSGSETPGTSESATPESGPGTSTEPSEGSAPGSPAGSPTSTEEGTSESATPESGPGSEPATSGSETPGTSESATPESGPGSPAGSPTSTEEGSPAGSPTSTEEGTSTEPSEGSAPGTSESATPESGPGTSESATPESGPGTSESATPESGPGSEPATSGSETPGSEPATSGSETPGSPAGSPTSTEEGTSTEPSEGSAPGTSTEPSEGSAPGGSAPEAGRSANHTPAGLTGPATSGSETPGTDIQMTQSPSSLSASVGDRVTITCQASQDISNYLNWYQQKPGKAPKLLIYDASNLETGVPSRFSGSGSGTDFTFTISRLQPEDTATYFCQHFDHLPLAFGGGTKVEIKGATPPETGAETESPGETTGGSAESEPPGEGQVQLQESGPGAVKPSETLSLTCTVSGGSVSSGDYYWTWIRQSPGKGLEWIGHIYYSGNTNYNPSLKSRLTISIDTSKTQFSLKLSSVTAADTATYYCVRDRVTGAFDIWGQGTAVTVSSGGGGSELVVTQEPSLTVSPGGTVTLTCRSSNGAVTSSNYANWVQQKPGQAPRGLIGGTNKRAPGTPARFSGSSLGGKAALTLSGVQPEDEAVYYCALWYPNLWVFGGGTKLTVLGATPPETGAETESPGETTGGSAESEPPGEGEVQLQESGGGIVQPGGSLKLSCAASGFTFNTYAMNWVRQAPGKGLEWVARIRSKYNNYATYYADSVKDRFTISRDDSKNTVYLQMNNLKTEDTAVYYCVRHENFGNSYVSWFAHWGQGTLVTVSSGTAEAASASGEAGRSANHTPAGLTGPPGSPAGSPTSTEEGTSESATPESGPGTSTEPSEGSAPGSPAGSPTSTEEGTSTEPSEGSAPGTSTEPSEGSAPGTSESATPESGPGSEPATSGSETPGSEPATSGSETPGSPAGSPTSTEEGTSESATPESGPGTSTEPSEGSAPGTSTEPSEGSAPGSPAGSPTSTEEGTSTEPSEGSAPGTSTEPSEGSAPGTSESATPESGPGTSTEPSEGSAPGTSESATPESGPGSEPATSGSETPGTSTEPSEGSAPGTSTEPSEGSAPGTSESATPESGPGTSESATPESGPGSPAGSPTSTEEGTSESATPESGPGSEPATSGSETPGTSESATPESGPGTSTEPSEGSAPGTSTEPSEGSAPGTSTEPSEGSAPGTSTEPSEGSAPGTSTEPSEGSAPGTSTEPSEGSAPGSPAGSPTSTEEGTSTEPSEGSAPGTSESATPESGPGSEPATSGSETPGTSESATPESGPGSEPATSGSETPGTSESATPESGPGTSTEPSEGSAPGTSESATPESGPGSPAGSPTSTEEGSPAGSPTSTEEGSPAGSPTSTEEGTSESATPESGPGTSTEPSEGSAPGTSESATPESGPGSEPATSGSETPGTSESATPESGPGSEPATSGSETPGTSESATPESGPGTSTEPSEGSAPGSPAGSPTSTEEGTSESATPESGPGSEPATSGSETPGTSESATPESGPGSPAGSPTSTEEGSPAGSPTSTEEGTSTEPSEGSAPGTSESATPESGPGTSESATPESGPGTSESATPESGPGSEPATSGSETPGSEPATSGSETPGSPAGSPTSTEEGTSTEPSEGSAPGTSTEPSEGSAPGSEPATSGSETPGTSESATPESGPGTSTEPSEGAAEPEA

SEQ ID NO: 889 - protein, 1743 aa, Artificial Sequence
  Description of Artificial Sequence: Synthetic polypeptide
HHHHHHSPAGSPTSTEEGTSESATPESGPGTSTEPSEGSAPGTSESATPESGPGSEPATSGSETPGTSESATPESGPGSEPATSGSETPGTSESATPESGPGTSTEPSEGSAPGSPAGSPTSTEEGTSESATPESGPGSEPATSGSETPGTSESATPESGPGSPAGSPTSTEEGSPAGSPTSTEEGTSTEPSEGSAPGTSESATPESGPGTSESATPESGPGTSESATPESGPGSEPATSGSETPGSEPATSGSETPGSPAGSPTSTEEGTSTEPSEGSAPGTSTEPSEGSAPGGSAPEAGRSANHTPAGLTGPATSGSETPGTDIQMTQSPSSLSASVGDRVTITCQASQDISNYLNWYQQKPGKAPKLLIYDASNLETGVPSRFSGSGSGTDFTFTISRLQPEDTATYFCQHFDHLPLAFGGGTKVEIKGATPPETGAETESPGETTGGSAESEPPGEGQVQLQESGPGAVKPSETLSLTCTVSGGSVSSGDYYWTWIRQSPGKGLEWIGHIYYSGNTNYNPSLKSRLTISIDTSKTQFSLKLSSVTAADTATYYCVRDRVTGAFDIWGQGTAVTVSSGGGGSELVVTQEPSLTVSPGGTVTLTCRSSNGAVTSSNYANWVQQKPGQAPRGLIGGTNKRAPGTPARFSGSLLGGSAALTLSGVQPEDEAVYYCALWYPNLWVFGGGTKLTVLGATPPETGAETESPGETTGGSAESEPPGEGEVQLQESGGGIVQPGGSLKLSCAASGFTFNTYAMNWVRQAPGKGLEWVARIRSKYNNYATYYADSVKDRFTISRDDSKNTVYLQMNNLKTEDTAVYYCVRHENFGNSYVSWFAHWGQGTLVTVSSGTAEAASASGEAGRSANHTPAGLTGPPGSPAGSPTSTEEGTSESATPESGPGTSTEPSEGSAPGSPAGSPTSTEEGTSTEPSEGSAPGTSTEPSEGSAPGTSESATPESGPGSEPATSGSETPGSEPATSGSETPGSPAGSPTSTEEGTSESATPESGPGTSTEPSEGSAPGTSTEPSEGSAPGSPAGSPTSTEEGTSTEPSEGSAPGTSTEPSEGSAPGTSESATPESGPGTSTEPSEGSAPGTSESATPESGPGSEPATSGSETPGTSTEPSEGSAPGTSTEPSEGSAPGTSESATPESGPGTSESATPESGPGSPAGSPTSTEEGTSESATPESGPGSEPATSGSETPGTSESATPESGPGTSTEPSEGSAPGTSTEPSEGSAPGTSTEPSEGSAPGTSTEPSEGSAPGTSTEPSEGSAPGTSTEPSEGSAPGSPAGSPTSTEEGTSTEPSEGSAPGTSESATPESGPGSEPATSGSETPGTSESATPESGPGSEPATSGSETPGTSESATPESGPGTSTEPSEGSAPGTSESATPESGPGSPAGSPTSTEEGSPAGSPTSTEEGSPAGSPTSTEEGTSESATPESGPGTSTEPSEGSAPGTSESATPESGPGSEPATSGSETPGTSESATPESGPGSEPATSGSETPGTSESATPESGPGTSTEPSEGSAPGSPAGSPTSTEEGTSESATPESGPGSEPATSGSETPGTSESATPESGPGSPAGSPTSTEEGSPAGSPTSTEEGTSTEPSEGSAPGTSESATPESGPGTSESATPESGPGTSESATPESGPGSEPATSGSETPGSEPATSGSETPGSPAGSPTSTEEGTSTEPSEGSAPGTSTEPSEGSAPGSEPATSGSETPGTSESATPESGPGTSTEPSEGAAEPEA

SEQ ID NO: 890 - protein, 1020 aa, Artificial Sequence
  Description of Artificial Sequence: Synthetic polypeptide
HHHHHHGSPAGSPTSTEEGTSESATPESGPGTSTEPSEGSAPGSPAGSPTSTEEGTSTEPSEGSAPGTSTEPSEGSAPGTSESATPESGPGSEPATSGSETPGSEPATSGSETPGSPAGSPTSTEEGTSESATPESGPGTSTEPSEGSAPEAGRSANHTPAGLTGPATSGSETPGTDIQMTQSPSSLSASVGDRVTITCQASQDISNYLNWYQQKPGKAPKLLIYDASNLETGVPSRFSGSGSGTDFTFTISSLQPEDIATYFCQHFDHLPLAFGGGTKVEIKGATPPETGAETESPGETTGGSAESEPPGEGQVQLQESGPGLVKPSETLSLTCTVSGGSVSSGDYYWTWIRQSPGKGLEWIGHIYYSGNTNYNPSLKSRLTISIDTSKTQFSLKLSSVTAADTAIYYCVRDRVTGAFDIWGQGTMVTVSSGGGGSELVVTQEPSLTVSPGGTVTLTCRSSNGAVTSSNYANWVQQKPGQAPRGLIGGTNKRAPGTPARFSGSLLGGKAALTLSGVQPEDEAVYYCALWYPNLWVFGGGTKLTVLGATPPETGAETESPGETTGGSAESEPPGEGEVQLLESGGGIVQPGGSLKLSCAASGFTFNTYAMNWVRQAPGKGLEWVARIRSKYNNYATYYADSVKDRFTISRDDSKNTVYLQMNNLKTEDTAVYYCVRHENFGNSYVSWFAHWGQGTLVTVSSGTAEAASASGEAGRSANHTPAGLTGPPGSPAGSPTSTEEGTSESATPESGPGTSTEPSEGSAPGSPAGSPTSTEEGTSTEPSEGSAPGTSTEPSEGSAPGTSESATPESGPGSEPATSGSETPGSEPATSGSETPGSPAGSPTSTEEGTSESATPESGPGTSTEPSEGSAPGTSTEPSEGSAPGSPAGSPTSTEEGTSTEPSEGSAPGTSTEPSEGSAPGTSESATPESGPGTSTEPSEGSAPGTSESATPESGPGSEPATSGSETPGTSTEPSEGSAPGTSTEPSEGSAPGTSESATPESGPGTSESATPEGAAEPEA

SEQ ID NO: 891 - protein, 1020 aa, Artificial Sequence
  Description of Artificial Sequence: Synthetic polypeptide
HHHHHHGSPAGSPTSTEEGTSESATPESGPGTSTEPSEGSAPGSPAGSPTSTEEGTSTEPSEGSAPGTSTEPSEGSAPGTSESATPESGPGSEPATSGSETPGSEPATSGSETPGSPAGSPTSTEEGTSESATPESGPGTSTEPSEGSAPEAGRSANHTPAGLTGPATSGSETPGTDIQMTQSPSSLSASVGDRVTITCQASQDISNYLNWYQQKPGKAPKLLIYDASNLETGVPSRFSGSGSGTDFTFTISSLQPEDIATYFCQHFDHLPLAFGGGTKVEIKGATPPETGAETESPGETTGGSAESEPPGEGQVQLQESGPGLVKPSETLSLTCTVSGGSVSSGDYYWTWIRQSPGKGLEWIGHIYYSGNTNYNPSLKSRLTISIDTSKTQFSLKLSSVTAADTAIYYCVRDRVTGAFDIWGQGTMVTVSSGGGGSELVVTQEPSLTVSPGGTVTLTCRSSNGEVTTSNYANWVQQKPGQAPRGLIGGTIKRAPGTPARFSGSLLGGKAALTLSGVQPEDEAVYYCALWYPNLWVFGGGTKLTVLGATPPETGAETESPGETTGGSAESEPPGEGEVQLLESGGGIVQPGGSLKLSCAASGFTFNTYAMNWVRQAPGKGLEWVARIRSKYNNYATYYADSVKDRFTISRDDSKNTVYLQMNNLKTEDTAVYYCVRHENFGNSYVSWFAHWGQGTLVTVSSGTAEAASASGEAGRSANHTPAGLTGPPGSPAGSPTSTEEGTSESATPESGPGTSTEPSEGSAPGSPAGSPTSTEEGTSTEPSEGSAPGTSTEPSEGSAPGTSESATPESGPGSEPATSGSETPGSEPATSGSETPGSPAGSPTSTEEGTSESATPESGPGTSTEPSEGSAPGTSTEPSEGSAPGSPAGSPTSTEEGTSTEPSEGSAPGTSTEPSEGSAPGTSESATPESGPGTSTEPSEGSAPGTSESATPESGPGSEPATSGSETPGTSTEPSEGSAPGTSTEPSEGSAPGTSESATPESGPGTSESATPEGAAEPEA

SEQ ID NO: 892 - protein, 1020 aa, Artificial Sequence
  Description of Artificial Sequence: Synthetic polypeptide
HHHHHHGSPAGSPTSTEEGTSESATPESGPGTSTEPSEGSAPGSPAGSPTSTEEGTSTEPSEGSAPGTSTEPSEGSAPGTSESATPESGPGSEPATSGSETPGSEPATSGSETPGSPAGSPTSTEEGTSESATPESGPGTSTEPSEGSAPEAGRSANHTPAGLTGPATSGSETPGTDIQMTQSPSSLSASVGDRVTITCQASQDISNYLNWYQQKPGKAPKLLIYDASNLETGVPSRFSGSGSGTDFTFTISSLQPEDIATYFCQHFDHLPLAFGGGTKVEIKGATPPETGAETESPGETTGGSAESEPPGEGQVQLQESGPGLVKPSETLSLTCTVSGGSVSSGDYYWTWIRQSPGKGLEWIGHIYYSGNTNYNPSLKSRLTISIDTSKTQFSLKLSSVTAADTAIYYCVRDRVTGAFDIWGQGTMVTVSSGGGGSELVVTQEPSHTVSPGGTVTLTCRSSTGAVTSSNYANWVQQKPGQAPRGLIGGTIKRAPGTPARFSGSLLGGKAALTLSGVQPEDEAEYYCALWYPNLWVFGGGTKLTVLGATPPETGAETESPGETTGGSAESEPPGEGEVQLLESGGGIVQPGGSLKLSCAASGFTFNTYAMNWVRQAPGKGLEWVARIRSKYNNYATYYADSVKDRFTISRDDSKNTVYLQMNNLKTEDTAVYYCVRHENFGNSYVSWFAHWGQGTLVTVSSGTAEAASASGEAGRSANHTPAGLTGPPGSPAGSPTSTEEGTSESATPESGPGTSTEPSEGSAPGSPAGSPTSTEEGTSTEPSEGSAPGTSTEPSEGSAPGTSESATPESGPGSEPATSGSETPGSEPATSGSETPGSPAGSPTSTEEGTSESATPESGPGTSTEPSEGSAPGTSTEPSEGSAPGSPAGSPTSTEEGTSTEPSEGSAPGTSTEPSEGSAPGTSESATPESGPGTSTEPSEGSAPGTSESATPESGPGSEPATSGSETPGTSTEPSEGSAPGTSTEPSEGSAPGTSESATPESGPGTSESATPEGAAEPEA

SEQ ID NO: 893 - protein, 1020 aa, Artificial Sequence
  Description of Artificial Sequence: Synthetic polypeptide
HHHHHHGSPAGSPTSTEEGTSESATPESGPGTSTEPSEGSAPGSPAGSPTSTEEGTSTEPSEGSAPGTSTEPSEGSAPGTSESATPESGPGSEPATSGSETPGSEPATSGSETPGSPAGSPTSTEEGTSESATPESGPGTSTEPSEGSAPEAGRSANHTPAGLTGPATSGSETPGTDIQMTQSPSSLSASVGDRVTITCQASQDISNYLNWYQQKPGKAPKLLIYDASNLETGVPSRFSGSGSGTDFTFTISSLQPEDIATYFCQHFDHLPLAFGGGTKVEIKGATPPETGAETESPGETTGGSAESEPPGEGQVQLQESGPGLVKPSETLSLTCTVSGGSVSSGDYYWTWIRQSPGKGLEWIGHIYYSGNTNYNPSLKSRLTISIDTSKTQFSLKLSSVTAADTAIYYCVRDRVTGAFDIWGQGTMVTVSSGGGGSELVVTQEPSHTVSPGGTVTLTCRSSTGEVTTSNYANWVQQKPGQAPRGLIGGTIKRAPGTPARFSGSLLGGKAALTLSGVQPEDEAEYYCALWYPNLWVFGGGTKLTVLGATPPETGAETESPGETTGGSAESEPPGEGEVQLLESGGGIVQPGGSLKLSCAASGFTFNTYAMNWVRQAPGKGLEWVARIRSKYNNYATYYADSVKDRFTISRDDSKNTVYLQMNNLKTEDTAVYYCVRHENFGNSYVSWFAHWGQGTLVTVSSGTAEAASASGEAGRSANHTPAGLTGPPGSPAGSPTSTEEGTSESATPESGPGTSTEPSEGSAPGSPAGSPTSTEEGTSTEPSEGSAPGTSTEPSEGSAPGTSESATPESGPGSEPATSGSETPGSEPATSGSETPGSPAGSPTSTEEGTSESATPESGPGTSTEPSEGSAPGTSTEPSEGSAPGSPAGSPTSTEEGTSTEPSEGSAPGTSTEPSEGSAPGTSESATPESGPGTSTEPSEGSAPGTSESATPESGPGSEPATSGSETPGTSTEPSEGSAPGTSTEPSEGSAPGTSESATPESGPGTSESATPEGAAEPEA

SEQ ID NO: 894 - protein, 1020 aa, Artificial Sequence
  Description of Artificial Sequence: Synthetic polypeptide
HHHHHHGSPAGSPTSTEEGTSESATPESGPGTSTEPSEGSAPGSPAGSPTSTEEGTSTEPSEGSAPGTSTEPSEGSAPGTSESATPESGPGSEPATSGSETPGSEPATSGSETPGSPAGSPTSTEEGTSESATPESGPGTSTEPSEGSAPEAGRSANHTPAGLTGPATSGSETPGTDIQMTQSPSSLSASVGDRVTITCQASQDISNYLNWYQQKPGKAPKLLIYDASNLETGVPSRFSGSGSGTDFTFTISSLQPEDIATYFCQHFDHLPLAFGGGTKVEIKGATPPETGAETESPGETTGGSAESEPPGEGQVQLQESGPGLVKPSETLSLTCTVSGGSVSSGDYYWTWIRQSPGKGLEWIGHIYYSGNTNYNPSLKSRLTISIDTSKTQFSLKLSSVTAADTAIYYCVRDRVTGAFDIWGQGTMVTVSSGGGGSELVVTQEPSLTVSPGGTVTLTCRSSNGAVTSSNYANWVQQKPGQAPRGLIGGTNKRAPGTPARFSGSSLGGKAALTLSGVQPEDEAVYYCALWYPNLWVFGGGTKLTVLGATPPETGAETESPGETTGGSAESEPPGEGEVQLQESGGGIVQPGGSLKLSCAASGFTFNTYAMNWVRQAPGKGLEWVARIRSKYNNYATYYADSVKDRFTISRDDSKNTVYLQMNNLKTEDTAVYYCVRHENFGNSYVSWFAHWGQGTLVTVSSGTAEAASASGEAGRSANHTPAGLTGPPGSPAGSPTSTEEGTSESATPESGPGTSTEPSEGSAPGSPAGSPTSTEEGTSTEPSEGSAPGTSTEPSEGSAPGTSESATPESGPGSEPATSGSETPGSEPATSGSETPGSPAGSPTSTEEGTSESATPESGPGTSTEPSEGSAPGTSTEPSEGSAPGSPAGSPTSTEEGTSTEPSEGSAPGTSTEPSEGSAPGTSESATPESGPGTSTEPSEGSAPGTSESATPESGPGSEPATSGSETPGTSTEPSEGSAPGTSTEPSEGSAPGTSESATPESGPGTSESATPEGAAEPEA

SEQ ID NO: 895 - protein, 1020 aa, Artificial Sequence
  Description of Artificial Sequence: Synthetic polypeptide
HHHHHHGSPAGSPTSTEEGTSESATPESGPGTSTEPSEGSAPGSPAGSPTSTEEGTSTEPSEGSAPGTSTEPSEGSAPGTSESATPESGPGSEPATSGSETPGSEPATSGSETPGSPAGSPTSTEEGTSESATPESGPGTSTEPSEGSAPEAGRSANHTPAGLTGPATSGSETPGTDIQMTQSPSSLSASVGDRVTITCQASQDISNYLNWYQQKPGKAPKLLIYDASNLETGVPSRFSGSGSGTDFTFTISSLQPEDIATYFCQHFDHLPLAFGGGTKVEIKGATPPETGAETESPGETTGGSAESEPPGEGQVQLQESGPGLVKPSETLSLTCTVSGGSVSSGDYYWTWIRQSPGKGLEWIGHIYYSGNTNYNPSLKSRLTISIDTSKTQFSLKLSSVTAADTAIYYCVRDRVTGAFDIWGQGTMVTVSSGGGGSELVVTQEPSLTVSPGGTVTLTCRSSNGAVTSSNYANWVQQKPGQAPRGLIGGTNKRAPGTPARFSGSLLGGSAALTLSGVQPEDEAVYYCALWYPNLWVFGGGTKLTVLGATPPETGAETESPGETTGGSAESEPPGEGEVQLQESGGGIVQPGGSLKLSCAASGFTFNTYAMNWVRQAPGKGLEWVARIRSKYNNYATYYADSVKDRFTISRDDSKNTVYLQMNNLKTEDTAVYYCVRHENFGNSYVSWFAHWGQGTLVTVSSGTAEAASASGEAGRSANHTPAGLTGPPGSPAGSPTSTEEGTSESATPESGPGTSTEPSEGSAPGSPAGSPTSTEEGTSTEPSEGSAPGTSTEPSEGSAPGTSESATPESGPGSEPATSGSETPGSEPATSGSETPGSPAGSPTSTEEGTSESATPESGPGTSTEPSEGSAPGTSTEPSEGSAPGSPAGSPTSTEEGTSTEPSEGSAPGTSTEPSEGSAPGTSESATPESGPGTSTEPSEGSAPGTSESATPESGPGSEPATSGSETPGTSTEPSEGSAPGTSTEPSEGSAPGTSESATPESGPGTSESATPEGAAEPEA

SEQ ID NO: 896 - protein, 1020 aa, Artificial Sequence
  Description of Artificial Sequence: Synthetic polypeptide
HHHHHHGSPAGSPTSTEEGTSESATPESGPGTSTEPSEGSAPGSPAGSPTSTEEGTSTEPSEGSAPGTSTEPSEGSAPGTSESATPESGPGSEPATSGSETPGSEPATSGSETPGSPAGSPTSTEEGTSESATPESGPGTSTEPSEGSAPEAGRSANHTPAGLTGPATSGSETPGTDIQMTQSPSSLSASVGDRVTITCQASQDISNYLNWYQQKPGKAPKLLIYDASNLETGVPSRFSGSGSGTDFTFTISSLQPEDIATYFCQHFDHLPLAFGGGTKVEIKGATPPETGAETESPGETTGGSAESEPPGEGQVQLQESGPGLVKPSETLSLTCTVSGGSVSSGDYYWTWIRQSPGKGLEWIGHIYYSGNTNYNPSLKSRLTISIDTSKTQFSLKLSSVTAADTAIYYCVRDRVTGAFDIWGQGTMVTVSSGGGGSELVVTQEPSLTVSPGGTVTLTCRSSNGAVTSSNYANWVQQKPGQAPRGLIGGTNKRAPGTPARFSGSSLGGSAALTLSGVQPEDEAVYYCALWYPNLWVFGGGTKLTVLGATPPETGAETESPGETTGGSAESEPPGEGEVQLQESGGGIVQPGGSLKLSCAASGFTFNTYAMNWVRQAPGKGLEWVARIRSKYNNYATYYADSVKDRFTISRDDSKNTVYLQMNNLKTEDTAVYYCVRHENFGNSYVSWFAHWGQGTLVTVSSGTAEAASASGEAGRSANHTPAGLTGPPGSPAGSPTSTEEGTSESATPESGPGTSTEPSEGSAPGSPAGSPTSTEEGTSTEPSEGSAPGTSTEPSEGSAPGTSESATPESGPGSEPATSGSETPGSEPATSGSETPGSPAGSPTSTEEGTSESATPESGPGTSTEPSEGSAPGTSTEPSEGSAPGSPAGSPTSTEEGTSTEPSEGSAPGTSTEPSEGSAPGTSESATPESGPGTSTEPSEGSAPGTSESATPESGPGSEPATSGSETPGTSTEPSEGSAPGTSTEPSEGSAPGTSESATPESGPGTSESATPEGAAEPEA

SEQ ID NO: 897 - protein, 1020 aa, Artificial Sequence
  Description of Artificial Sequence: Synthetic polypeptide
HHHHHHGSPAGSPTSTEEGTSESATPESGPGTSTEPSEGSAPGSPAGSPTSTEEGTSTEPSEGSAPGTSTEPSEGSAPGTSESATPESGPGSEPATSGSETPGSEPATSGSETPGSPAGSPTSTEEGTSESATPESGPGTSTEPSEGSAPEAGRSANHTPAGLTGPATSGSETPGTDIQMTQSPSSLSASVGDRVTITCQASQDISNYLNWYQQKPGKAPKLLIYDASNLETGVPSRFSGSGSGTDFTFTISSLQPEDIATYFCQHFDHLPLAFGGGTKVEIKGATPPETGAETESPGETTGGSAESEPPGEGQVQLQESGPGLVKPSETLSLTCTVSGGSVSSGDYYWTWIRQSPGKGLEWIGHIYYSGNTNYNPSLKSRLTISIDTSKTQFSLKLSSVTAADTAIYYCVRDRVTGAFDIWGQGTMVTVSSGGGGSELVVTQEPSLTVSPGGTVTLTCRSSTGAVTTSNYANWVQQKPGQAPRGLIGGTNKRAPGTPARFSGSSLGGSAALTLSGVQPEDEAEYYCALWYSNLWVFGGGTKLTVLGATPPETGAETESPGETTGGSAESEPPGEGEVQLQESGGGLVQPGGSLKLSCAASGFTFNTYAMNWVRQAPGKGLEWVARIRSKYNNYATYYADSVKDRFTISRDDSKNTAYLQMNNLKTEDTAVYYCVRHGNFGNSYVSWFAYWGQGTLVTVSSGTAEAASASGEAGRSANHTPAGLTGPPGSPAGSPTSTEEGTSESATPESGPGTSTEPSEGSAPGSPAGSPTSTEEGTSTEPSEGSAPGTSTEPSEGSAPGTSESATPESGPGSEPATSGSETPGSEPATSGSETPGSPAGSPTSTEEGTSESATPESGPGTSTEPSEGSAPGTSTEPSEGSAPGSPAGSPTSTEEGTSTEPSEGSAPGTSTEPSEGSAPGTSESATPESGPGTSTEPSEGSAPGTSESATPESGPGSEPATSGSETPGTSTEPSEGSAPGTSTEPSEGSAPGTSESATPESGPGTSESATPEGAAEPEA

SEQ ID NO: 898 - protein, 1020 aa, Artificial Sequence
  Description of Artificial Sequence: Synthetic polypeptide
HHHHHHGSPAGSPTSTEEGTSESATPESGPGTSTEPSEGSAPGSPAGSPTSTEEGTSTEPSEGSAPGTSTEPSEGSAPGTSESATPESGPGSEPATSGSETPGSEPATSGSETPGSPAGSPTSTEEGTSESATPESGPGTSTEPSEGSAPEAGRSANHTPAGLTGPATSGSETPGTDIQMTQSPSSLSASVGDRVTITCQASQDISNYLNWYQQKPGKAPKLLIYDASNLETGVPSRFSGSGSGTDFTFTISRLQPEDTATYFCQHFDHLPLAFGGGTKVEIKGATPPETGAETESPGETTGGSAESEPPGEGQVQLQESGPGAVKPSETLSLTCTVSGGSVSSGDYYWTWIRQSPGKGLEWIGHIYYSGNTNYNPSLKSRLTISIDTSKTQFSLKLSSVTAADTATYYCVRDRVTGAFDIWGQGTAVTVSSGGGGSELVVTQEPSLTVSPGGTVTLTCRSSNGAVTSSNYANWVQQKPGQAPRGLIGGTNKRAPGTPARFSGSLLGGKAALTLSGVQPEDEAVYYCALWYPNLWVFGGGTKLTVLGATPPETGAETESPGETTGGSAESEPPGEGEVQLLESGGGIVQPGGSLKLSCAASGFTFNTYAMNWVRQAPGKGLEWVARIRSKYNNYATYYADSVKDRFTISRDDSKNTVYLQMNNLKTEDTAVYYCVRHENFGNSYVSWFAHWGQGTLVTVSSGTAEAASASGEAGRSANHTPAGLTGPPGSPAGSPTSTEEGTSESATPESGPGTSTEPSEGSAPGSPAGSPTSTEEGTSTEPSEGSAPGTSTEPSEGSAPGTSESATPESGPGSEPATSGSETPGSEPATSGSETPGSPAGSPTSTEEGTSESATPESGPGTSTEPSEGSAPGTSTEPSEGSAPGSPAGSPTSTEEGTSTEPSEGSAPGTSTEPSEGSAPGTSESATPESGPGTSTEPSEGSAPGTSESATPESGPGSEPATSGSETPGTSTEPSEGSAPGTSTEPSEGSAPGTSESATPESGPGTSESATPEGAAEPEA

SEQ ID NO: 899 - protein, 1020 aa, Artificial Sequence
  Description of Artificial Sequence: Synthetic polypeptide
HHHHHHGSPAGSPTSTEEGTSESATPESGPGTSTEPSEGSAPGSPAGSPTSTEEGTSTEPSEGSAPGTSTEPSEGSAPGTSESATPESGPGSEPATSGSETPGSEPATSGSETPGSPAGSPTSTEEGTSESATPESGPGTSTEPSEGSAPEAGRSANHTPAGLTGPATSGSETPGTDIQMTQSPSSLSASVGDRVTITCQASQDISNYLNWYQQKPGKAPKLLIYDASNLETGVPSRFSGSGSGTDFTFTISRLQPEDTATYFCQHFDHLPLAFGGGTKVEIKGATPPETGAETESPGETTGGSAESEPPGEGQVQLQESGPGAVKPSETLSLTCTVSGGSVSSGDYYWTWIRQSPGKGLEWIGHIYYSGNTNYNPSLKSRLTISIDTSKTQFSLKLSSVTAADTATYYCVRDRVTGAFDIWGQGTAVTVSSGGGGSELVVTQEPSLTVSPGGTVTLTCRSSNGEVTTSNYANWVQQKPGQAPRGLIGGTIKRAPGTPARFSGSLLGGKAALTLSGVQPEDEAVYYCALWYPNLWVFGGGTKLTVLGATPPETGAETESPGETTGGSAESEPPGEGEVQLLESGGGIVQPGGSLKLSCAASGFTFNTYAMNWVRQAPGKGLEWVARIRSKYNNYATYYADSVKDRFTISRDDSKNTVYLQMNNLKTEDTAVYYCVRHENFGNSYVSWFAHWGQGTLVTVSSGTAEAASASGEAGRSANHTPAGLTGPPGSPAGSPTSTEEGTSESATPESGPGTSTEPSEGSAPGSPAGSPTSTEEGTSTEPSEGSAPGTSTEPSEGSAPGTSESATPESGPGSEPATSGSETPGSEPATSGSETPGSPAGSPTSTEEGTSESATPESGPGTSTEPSEGSAPGTSTEPSEGSAPGSPAGSPTSTEEGTSTEPSEGSAPGTSTEPSEGSAPGTSESATPESGPGTSTEPSEGSAPGTSESATPESGPGSEPATSGSETPGTSTEPSEGSAPGTSTEPSEGSAPGTSESATPESGPGTSESATPEGAAEPEA

SEQ ID NO: 900 - protein, 1020 aa, Artificial Sequence
  Description of Artificial Sequence: Synthetic polypeptide
HHHHHHGSPAGSPTSTEEGTSESATPESGPGTSTEPSEGSAPGSPAGSPTSTEEGTSTEPSEGSAPGTSTEPSEGSAPGTSESATPESGPGSEPATSGSETPGSEPATSGSETPGSPAGSPTSTEEGTSESATPESGPGTSTEPSEGSAPEAGRSANHTPAGLTGPATSGSETPGTDIQMTQSPSSLSASVGDRVTITCQASQDISNYLNWYQQKPGKAPKLLIYDASNLETGVPSRFSGSGSGTDFTFTISRLQPEDTATYFCQHFDHLPLAFGGGTKVEIKGATPPETGAETESPGETTGGSAESEPPGEGQVQLQESGPGAVKPSETLSLTCTVSGGSVSSGDYYWTWIRQSPGKGLEWIGHIYYSGNTNYNPSLKSRLTISIDTSKTQFSLKLSSVTAADTATYYCVRDRVTGAFDIWGQGTAVTVSSGGGGSELVVTQEPSHTVSPGGTVTLTCRSSTGAVTSSNYANWVQQKPGQAPRGLIGGTIKRAPGTPARFSGSLLGGKAALTLSGVQPEDEAEYYCALWYPNLWVFGGGTKLTVLGATPPETGAETESPGETTGGSAESEPPGEGEVQLLESGGGIVQPGGSLKLSCAASGFTFNTYAMNWVRQAPGKGLEWVARIRSKYNNYATYYADSVKDRFTISRDDSKNTVYLQMNNLKTEDTAVYYCVRHENFGNSYVSWFAHWGQGTLVTVSSGTAEAASASGEAGRSANHTPAGLTGPPGSPAGSPTSTEEGTSESATPESGPGTSTEPSEGSAPGSPAGSPTSTEEGTSTEPSEGSAPGTSTEPSEGSAPGTSESATPESGPGSEPATSGSETPGSEPATSGSETPGSPAGSPTSTEEGTSESATPESGPGTSTEPSEGSAPGTSTEPSEGSAPGSPAGSPTSTEEGTSTEPSEGSAPGTSTEPSEGSAPGTSESATPESGPGTSTEPSEGSAPGTSESATPESGPGSEPATSGSETPGTSTEPSEGSAPGTSTEPSEGSAPGTSESATPESGPGTSESATPEGAAEPEA

SEQ ID NO: 901 - protein, 1020 aa, Artificial Sequence
  Description of Artificial Sequence: Synthetic polypeptide
HHHHHHGSPAGSPTSTEEGTSESATPESGPGTSTEPSEGSAPGSPAGSPTSTEEGTSTEPSEGSAPGTSTEPSEGSAPGTSESATPESGPGSEPATSGSETPGSEPATSGSETPGSPAGSPTSTEEGTSESATPESGPGTSTEPSEGSAPEAGRSANHTPAGLTGPATSGSETPGTDIQMTQSPSSLSASVGDRVTITCQASQDISNYLNWYQQKPGKAPKLLIYDASNLETGVPSRFSGSGSGTDFTFTISRLQPEDTATYFCQHFDHLPLAFGGGTKVEIKGATPPETGAETESPGETTGGSAESEPPGEGQVQLQESGPGAVKPSETLSLTCTVSGGSVSSGDYYWTWIRQSPGKGLEWIGHIYYSGNTNYNPSLKSRLTISIDTSKTQFSLKLSSVTAADTATYYCVRDRVTGAFDIWGQGTAVTVSSGGGGSELVVTQEPSHTVSPGGTVTLTCRSSTGEVTTSNYANWVQQKPGQAPRGLIGGTIKRAPGTPARFSGSLLGGKAALTLSGVQPEDEAEYYCALWYPNLWVFGGGTKLTVLGATPPETGAETESPGETTGGSAESEPPGEGEVQLLESGGGIVQPGGSLKLSCAASGFTFNTYAMNWVRQAPGKGLEWVARIRSKYNNYATYYADSVKDRFTISRDDSKNTVYLQMNNLKTEDTAVYYCVRHENFGNSYVSWFAHWGQGTLVTVSSGTAEAASASGEAGRSANHTPAGLTGPPGSPAGSPTSTEEGTSESATPESGPGTSTEPSEGSAPGSPAGSPTSTEEGTSTEPSEGSAPGTSTEPSEGSAPGTSESATPESGPGSEPATSGSETPGSEPATSGSETPGSPAGSPTSTEEGTSESATPESGPGTSTEPSEGSAPGTSTEPSEGSAPGSPAGSPTSTEEGTSTEPSEGSAPGTSTEPSEGSAPGTSESATPESGPGTSTEPSEGSAPGTSESATPESGPGSEPATSGSETPGTSTEPSEGSAPGTSTEPSEGSAPGTSESATPESGPGTSESATPEGAAEPEA

SEQ ID NO: 902 - protein, 1020 aa, Artificial Sequence
  Description of Artificial Sequence: Synthetic polypeptide
HHHHHHGSPAGSPTSTEEGTSESATPESGPGTSTEPSEGSAPGSPAGSPTSTEEGTSTEPSEGSAPGTSTEPSEGSAPGTSESATPESGPGSEPATSGSETPGSEPATSGSETPGSPAGSPTSTEEGTSESATPESGPGTSTEPSEGSAPEAGRSANHTPAGLTGPATSGSETPGTDIQMTQSPSSLSASVGDRVTITCQASQDISNYLNWYQQKPGKAPKLLIYDASNLETGVPSRFSGSGSGTDFTFTISRLQPEDTATYFCQHFDHLPLAFGGGTKVEIKGATPPETGAETESPGETTGGSAESEPPGEGQVQLQESGPGAVKPSETLSLTCTVSGGSVSSGDYYWTWIRQSPGKGLEWIGHIYYSGNTNYNPSLKSRLTISIDTSKTQFSLKLSSVTAADTATYYCVRDRVTGAFDIWGQGTAVTVSSGGGGSELVVTQEPSLTVSPGGTVTLTCRSSNGAVTSSNYANWVQQKPGQAPRGLIGGTNKRAPGTPARFSGSSLGGKAALTLSGVQPEDEAVYYCALWYPNLWVFGGGTKLTVLGATPPETGAETESPGETTGGSAESEPPGEGEVQLQESGGGIVQPGGSLKLSCAASGFTFNTYAMNWVRQAPGKGLEWVARIRSKYNNYATYYADSVKDRFTISRDDSKNTVYLQMNNLKTEDTAVYYCVRHENFGNSYVSWFAHWGQGTLVTVSSGTAEAASASGEAGRSANHTPAGLTGPPGSPAGSPTSTEEGTSESATPESGPGTSTEPSEGSAPGSPAGSPTSTEEGTSTEPSEGSAPGTSTEPSEGSAPGTSESATPESGPGSEPATSGSETPGSEPATSGSETPGSPAGSPTSTEEGTSESATPESGPGTSTEPSEGSAPGTSTEPSEGSAPGSPAGSPTSTEEGTSTEPSEGSAPGTSTEPSEGSAPGTSESATPESGPGTSTEPSEGSAPGTSESATPESGPGSEPATSGSETPGTSTEPSEGSAPGTSTEPSEGSAPGTSESATPESGPGTSESATPEGAAEPEA

SEQ ID NO: 903 - protein, 1020 aa, Artificial Sequence
  Description of Artificial Sequence: Synthetic polypeptide
HHHHHHGSPAGSPTSTEEGTSESATPESGPGTSTEPSEGSAPGSPAGSPTSTEEGTSTEPSEGSAPGTSTEPSEGSAPGTSESATPESGPGSEPATSGSETPGSEPATSGSETPGSPAGSPTSTEEGTSESATPESGPGTSTEPSEGSAPEAGRSANHTPAGLTGPATSGSETPGTDIQMTQSPSSLSASVGDRVTITCQASQDISNYLNWYQQKPGKAPKLLIYDASNLETGVPSRFSGSGSGTDFTFTISRLQPEDTATYFCQHFDHLPLAFGGGTKVEIKGATPPETGAETESPGETTGGSAESEPPGEGQVQLQESGPGAVKPSETLSLTCTVSGGSVSSGDYYWTWIRQSPGKGLEWIGHIYYSGNTNYNPSLKSRLTISIDTSKTQFSLKLSSVTAADTATYYCVRDRVTGAFDIWGQGTAVTVSSGGGGSELVVTQEPSLTVSPGGTVTLTCRSSNGAVTSSNYANWVQQKPGQAPRGLIGGTNKRAPGTPARFSGSLLGGSAALTLSGVQPEDEAVYYCALWYPNLWVFGGGTKLTVLGATPPETGAETESPGETTGGSAESEPPGEGEVQLQESGGGIVQPGGSLKLSCAASGFTFNTYAMNWVRQAPGKGLEWVARIRSKYNNYATYYADSVKDRFTISRDDSKNTVYLQMNNLKTEDTAVYYCVRHENFGNSYVSWFAHWGQGTLVTVSSGTAEAASASGEAGRSANHTPAGLTGPPGSPAGSPTSTEEGTSESATPESGPGTSTEPSEGSAPGSPAGSPTSTEEGTSTEPSEGSAPGTSTEPSEGSAPGTSESATPESGPGSEPATSGSETPGSEPATSGSETPGSPAGSPTSTEEGTSESATPESGPGTSTEPSEGSAPGTSTEPSEGSAPGSPAGSPTSTEEGTSTEPSEGSAPGTSTEPSEGSAPGTSESATPESGPGTSTEPSEGSAPGTSESATPESGPGSEPATSGSETPGTSTEPSEGSAPGTSTEPSEGSAPGTSESATPESGPGTSESATPEGAAEPEA

SEQ ID NO: 904 - protein, 1020 aa, Artificial Sequence
  Description of Artificial Sequence: Synthetic polypeptide
HHHHHHGSPAGSPTSTEEGTSESATPESGPGTSTEPSEGSAPGSPAGSPTSTEEGTSTEPSEGSAPGTSTEPSEGSAPGTSESATPESGPGSEPATSGSETPGSEPATSGSETPGSPAGSPTSTEEGTSESATPESGPGTSTEPSEGSAPEAGRSANHTPAGLTGPATSGSETPGTDIQMTQSPSSLSASVGDRVTITCQASQDISNYLNWYQQKPGKAPKLLIYDASNLETGVPSRFSGSGSGTDFTFTISRLQPEDTATYFCQHFDHLPLAFGGGTKVEIKGATPPETGAETESPGETTGGSAESEPPGEGQVQLQESGPGAVKPSETLSLTCTVSGGSVSSGDYYWTWIRQSPGKGLEWIGHIYYSGNTNYNPSLKSRLTISIDTSKTQFSLKLSSVTAADTATYYCVRDRVTGAFDIWGQGTAVTVSSGGGGSELVVTQEPSLTVSPGGTVTLTCRSSNGAVTSSNYANWVQQKPGQAPRGLIGGTNKRAPGTPARFSGSSLGGSAALTLSGVQPEDEAVYYCALWYPNLWVFGGGTKLTVLGATPPETGAETESPGETTGGSAESEPPGEGEVQLQESGGGIVQPGGSLKLSCAASGFTFNTYAMNWVRQAPGKGLEWVARIRSKYNNYATYYADSVKDRFTISRDDSKNTVYLQMNNLKTEDTAVYYCVRHENFGNSYVSWFAHWGQGTLVTVSSGTAEAASASGEAGRSANHTPAGLTGPPGSPAGSPTSTEEGTSESATPESGPGTSTEPSEGSAPGSPAGSPTSTEEGTSTEPSEGSAPGTSTEPSEGSAPGTSESATPESGPGSEPATSGSETPGSEPATSGSETPGSPAGSPTSTEEGTSESATPESGPGTSTEPSEGSAPGTSTEPSEGSAPGSPAGSPTSTEEGTSTEPSEGSAPGTSTEPSEGSAPGTSESATPESGPGTSTEPSEGSAPGTSESATPESGPGSEPATSGSETPGTSTEPSEGSAPGTSTEPSEGSAPGTSESATPESGPGTSESATPEGAAEPEA

SEQ ID NO: 905 - protein, 1020 aa, Artificial Sequence
  Description of Artificial Sequence: Synthetic polypeptide
HHHHHHGSPAGSPTSTEEGTSESATPESGPGTSTEPSEGSAPGSPAGSPTSTEEGTSTEPSEGSAPGTSTEPSEGSAPGTSESATPESGPGSEPATSGSETPGSEPATSGSETPGSPAGSPTSTEEGTSESATPESGPGTSTEPSEGSAPEAGRSANHTPAGLTGPATSGSETPGTDIQMTQSPSSLSASVGDRVTITCQASQDISNYLNWYQQKPGKAPKLLIYDASNLETGVPSRFSGSGSGTDFTFTISRLQPEDTATYFCQHFDHLPLAFGGGTKVEIKGATPPETGAETESPGETTGGSAESEPPGEGQVQLQESGPGAVKPSETLSLTCTVSGGSVSSGDYYWTWIRQSPGKGLEWIGHIYYSGNTNYNPSLKSRLTISIDTSKTQFSLKLSSVTAADTATYYCVRDRVTGAFDIWGQGTAVTVSSGGGGSELVVTQEPSLTVSPGGTVTLTCRSSTGAVTTSNYANWVQQKPGQAPRGLIGGTNKRAPGTPARFSGSSLGGSAALTLSGVQPEDEAEYYCALWYSNLWVFGGGTKLTVLGATPPETGAETESPGETTGGSAESEPPGEGEVQLQESGGGLVQPGGSLKLSCAASGFTFNTYAMNWVRQAPGKGLEWVARIRSKYNNYATYYADSVKDRFTISRDDSKNTAYLQMNNLKTEDTAVYYCVRHGNFGNSYVSWFAYWGQGTLVTVSSGTAEAASASGEAGRSANHTPAGLTGPPGSPAGSPTSTEEGTSESATPESGPGTSTEPSEGSAPGSPAGSPTSTEEGTSTEPSEGSAPGTSTEPSEGSAPGTSESATPESGPGSEPATSGSETPGSEPATSGSETPGSPAGSPTSTEEGTSESATPESGPGTSTEPSEGSAPGTSTEPSEGSAPGSPAGSPTSTEEGTSTEPSEGSAPGTSTEPSEGSAPGTSESATPESGPGTSTEPSEGSAPGTSESATPESGPGSEPATSGSETPGTSTEPSEGSAPGTSTEPSEGSAPGTSESATPESGPGTSESATPEGAAEPEA

SEQ ID NO: 906 - protein, 1175 aa, Artificial Sequence
  Description of Artificial Sequence: Synthetic polypeptide
HHHHHHSPAGSPTSTEEGTSESATPESGPGTSTEPSEGSAPGTSESATPESGPGSEPATSGSETPGTSESATPESGPGSEPATSGSETPGTSESATPESGPGTSTEPSEGSAPGSPAGSPTSTEEGTSESATPESGPGSEPATSGSETPGTSESATPESGPGSPAGSPTSTEEGSPAGSPTSTEEGTSTEPSEGSAPGTSESATPESGPGTSESATPESGPGTSESATPESGPGSEPATSGSETPGSEPATSGSETPGSPAGSPTSTEEGTSTEPSEGSAPGTSTEPSEGSAPGGSAPEAGRSANHTPAGLTGPATSGSETPGTDIQMTQSPSSLSASVGDRVTITCQASQDISNYLNWYQQKPGKAPKLLIYDASNLETGVPSRFSGSGSGTDFTFTISSLQPEDIATYFCQHFDHLPLAFGGGTKVEIKGATPPETGAETESPGETTGGSAESEPPGEGQVQLQESGPGLVKPSETLSLTCTVSGGSVSSGDYYWTWIRQSPGKGLEWIGHIYYSGNTNYNPSLKSRLTISIDTSKTQFSLKLSSVTAADTAIYYCVRDRVTGAFDIWGQGTMVTVSSGGGGSELVVTQEPSLTVSPGGTVTLTCRSSNGAVTSSNYANWVQQKPGQAPRGLIGGTNKRAPGTPARFSGSLLGGKAALTLSGVQPEDEAVYYCALWYPNLWVFGGGTKLTVLGATPPETGAETESPGETTGGSAESEPPGEGEVQLLESGGGIVQPGGSLKLSCAASGFTFNTYAMNWVRQAPGKGLEWVARIRSKYNNYATYYADSVKDRFTISRDDSKNTVYLQMNNLKTEDTAVYYCVRHENFGNSYVSWFAHWGQGTLVTVSSGTAEAASASGEAGRSANHTPAGLTGPPGSPAGSPTSTEEGTSESATPESGPGTSTEPSEGSAPGSPAGSPTSTEEGTSTEPSEGSAPGTSTEPSEGSAPGTSESATPESGPGSEPATSGSETPGSEPATSGSETPGSPAGSPTSTEEGTSESATPESGPGTSTEPSEGSAPGTSTEPSEGSAPGSPAGSPTSTEEGTSTEPSEGSAPGTSTEPSEGSAPGTSESATPESGPGTSTEPSEGSAPGTSESATPESGPGSEPATSGSETPGTSTEPSEGSAPGTSTEPSEGSAPGTSESATPESGPGTSESATPESGPGSPAGAAEPEA

SEQ ID NO: 907 - protein, 1175 aa, Artificial Sequence
  Description of Artificial Sequence: Synthetic polypeptide
HHHHHHSPAGSPTSTEEGTSESATPESGPGTSTEPSEGSAPGTSESATPESGPGSEPATSGSETPGTSESATPESGPGSEPATSGSETPGTSESATPESGPGTSTEPSEGSAPGSPAGSPTSTEEGTSESATPESGPGSEPATSGSETPGTSESATPESGPGSPAGSPTSTEEGSPAGSPTSTEEGTSTEPSEGSAPGTSESATPESGPGTSESATPESGPGTSESATPESGPGSEPATSGSETPGSEPATSGSETPGSPAGSPTSTEEGTSTEPSEGSAPGTSTEPSEGSAPGGSAPEAGRSANHTPAGLTGPATSGSETPGTDIQMTQSPSSLSASVGDRVTITCQASQDISNYLNWYQQKPGKAPKLLIYDASNLETGVPSRFSGSGSGTDFTFTISSLQPEDIATYFCQHFDHLPLAFGGGTKVEIKGATPPETGAETESPGETTGGSAESEPPGEGQVQLQESGPGLVKPSETLSLTCTVSGGSVSSGDYYWTWIRQSPGKGLEWIGHIYYSGNTNYNPSLKSRLTISIDTSKTQFSLKLSSVTAADTAIYYCVRDRVTGAFDIWGQGTMVTVSSGGGGSELVVTQEPSLTVSPGGTVTLTCRSSNGEVTTSNYANWVQQKPGQAPRGLIGGTIKRAPGTPARFSGSLLGGKAALTLSGVQPEDEAVYYCALWYPNLWVFGGGTKLTVLGATPPETGAETESPGETTGGSAESEPPGEGEVQLLESGGGIVQPGGSLKLSCAASGFTFNTYAMNWVRQAPGKGLEWVARIRSKYNNYATYYADSVKDRFTISRDDSKNTVYLQMNNLKTEDTAVYYCVRHENFGNSYVSWFAHWGQGTLVTVSSGTAEAASASGEAGRSANHTPAGLTGPPGSPAGSPTSTEEGTSESATPESGPGTSTEPSEGSAPGSPAGSPTSTEEGTSTEPSEGSAPGTSTEPSEGSAPGTSESATPESGPGSEPATSGSETPGSEPATSGSETPGSPAGSPTSTEEGTSESATPESGPGTSTEPSEGSAPGTSTEPSEGSAPGSPAGSPTSTEEGTSTEPSEGSAPGTSTEPSEGSAPGTSESATPESGPGTSTEPSEGSAPGTSESATPESGPGSEPATSGSETPGTSTEPSEGSAPGTSTEPSEGSAPGTSESATPESGPGTSESATPESGPGSPAGAAEPEA

SEQ ID NO: 908 - protein, 1175 aa, Artificial Sequence
  Description of Artificial Sequence: Synthetic polypeptide
HHHHHHSPAGSPTSTEEGTSESATPESGPGTSTEPSEGSAPGTSESATPESGPGSEPATSGSETPGTSESATPESGPGSEPATSGSETPGTSESATPESGPGTSTEPSEGSAPGSPAGSPTSTEEGTSESATPESGPGSEPATSGSETPGTSESATPESGPGSPAGSPTSTEEGSPAGSPTSTEEGTSTEPSEGSAPGTSESATPESGPGTSESATPESGPGTSESATPESGPGSEPATSGSETPGSEPATSGSETPGSPAGSPTSTEEGTSTEPSEGSAPGTSTEPSEGSAPGGSAPEAGRSANHTPAGLTGPATSGSETPGTDIQMTQSPSSLSASVGDRVTITCQASQDISNYLNWYQQKPGKAPKLLIYDASNLETGVPSRFSGSGSGTDFTFTISSLQPEDIATYFCQHFDHLPLAFGGGTKVEIKGATPPETGAETESPGETTGGSAESEPPGEGQVQLQESGPGLVKPSETLSLTCTVSGGSVSSGDYYWTWIRQSPGKGLEWIGHIYYSGNTNYNPSLKSRLTISIDTSKTQFSLKLSSVTAADTAIYYCVRDRVTGAFDIWGQGTMVTVSSGGGGSELVVTQEPSHTVSPGGTVTLTCRSSTGAVTSSNYANWVQQKPGQAPRGLIGGTIKRAPGTPARFSGSLLGGKAALTLSGVQPEDEAEYYCALWYPNLWVFGGGTKLTVLGATPPETGAETESPGETTGGSAESEPPGEGEVQLLESGGGIVQPGGSLKLSCAASGFTFNTYAMNWVRQAPGKGLEWVARIRSKYNNYATYYADSVKDRFTISRDDSKNTVYLQMNNLKTEDTAVYYCVRHENFGNSYVSWFAHWGQGTLVTVSSGTAEAASASGEAGRSANHTPAGLTGPPGSPAGSPTSTEEGTSESATPESGPGTSTEPSEGSAPGSPAGSPTSTEEGTSTEPSEGSAPGTSTEPSEGSAPGTSESATPESGPGSEPATSGSETPGSEPATSGSETPGSPAGSPTSTEEGTSESATPESGPGTSTEPSEGSAPGTSTEPSEGSAPGSPAGSPTSTEEGTSTEPSEGSAPGTSTEPSEGSAPGTSESATPESGPGTSTEPSEGSAPGTSESATPESGPGSEPATSGSETPGTSTEPSEGSAPGTSTEPSEGSAPGTSESATPESGPGTSESATPESGPGSPAGAAEPEA

SEQ ID NO: 909 - protein, 1175 aa, Artificial Sequence
  Description of Artificial Sequence: Synthetic polypeptide
HHHHHHSPAGSPTSTEEGTSESATPESGPGTSTEPSEGSAPGTSESATPESGPGSEPATSGSETPGTSESATPESGPGSEPATSGSETPGTSESATPESGPGTSTEPSEGSAPGSPAGSPTSTEEGTSESATPESGPGSEPATSGSETPGTSESATPESGPGSPAGSPTSTEEGSPAGSPTSTEEGTSTEPSEGSAPGTSESATPESGPGTSESATPESGPGTSESATPESGPGSEPATSGSETPGSEPATSGSETPGSPAGSPTSTEEGTSTEPSEGSAPGTSTEPSEGSAPGGSAPEAGRSANHTPAGLTGPATSGSETPGTDIQMTQSPSSLSASVGDRVTITCQASQDISNYLNWYQQKPGKAPKLLIYDASNLETGVPSRFSGSGSGTDFTFTISSLQPEDIATYFCQHFDHLPLAFGGGTKVEIKGATPPETGAETESPGETTGGSAESEPPGEGQVQLQESGPGLVKPSETLSLTCTVSGGSVSSGDYYWTWIRQSPGKGLEWIGHIYYSGNTNYNPSLKSRLTISIDTSKTQFSLKLSSVTAADTAIYYCVRDRVTGAFDIWGQGTMVTVSSGGGGSELVVTQEPSHTVSPGGTVTLTCRSSTGEVTTSNYANWVQQKPGQAPRGLIGGTIKRAPGTPARFSGSLLGGKAALTLSGVQPEDEAEYYCALWYPNLWVFGGGTKLTVLGATPPETGAETESPGETTGGSAESEPPGEGEVQLLESGGGIVQPGGSLKLSCAASGFTFNTYAMNWVRQAPGKGLEWVARIRSKYNNYATYYADSVKDRFTISRDDSKNTVYLQMNNLKTEDTAVYYCVRHENFGNSYVSWFAHWGQGTLVTVSSGTAEAASASGEAGRSANHTPAGLTGPPGSPAGSPTSTEEGTSESATPESGPGTSTEPSEGSAPGSPAGSPTSTEEGTSTEPSEGSAPGTSTEPSEGSAPGTSESATPESGPGSEPATSGSETPGSEPATSGSETPGSPAGSPTSTEEGTSESATPESGPGTSTEPSEGSAPGTSTEPSEGSAPGSPAGSPTSTEEGTSTEPSEGSAPGTSTEPSEGSAPGTSESATPESGPGTSTEPSEGSAPGTSESATPESGPGSEPATSGSETPGTSTEPSEGSAPGTSTEPSEGSAPGTSESATPESGPGTSESATPESGPGSPAGAAEPEA

SEQ ID NO: 910 - protein, 1175 aa, Artificial Sequence
  Description of Artificial Sequence: Synthetic polypeptide
HHHHHHSPAGSPTSTEEGTSESATPESGPGTSTEPSEGSAPGTSESATPESGPGSEPATSGSETPGTSESATPESGPGSEPATSGSETPGTSESATPESGPGTSTEPSEGSAPGSPAGSPTSTEEGTSESATPESGPGSEPATSGSETPGTSESATPESGPGSPAGSPTSTEEGSPAGSPTSTEEGTSTEPSEGSAPGTSESATPESGPGTSESATPESGPGTSESATPESGPGSEPATSGSETPGSEPATSGSETPGSPAGSPTSTEEGTSTEPSEGSAPGTSTEPSEGSAPGGSAPEAGRSANHTPAGLTGPATSGSETPGTDIQMTQSPSSLSASVGDRVTITCQASQDISNYLNWYQQKPGKAPKLLIYDASNLETGVPSRFSGSGSGTDFTFTISSLQPEDIATYFCQHFDHLPLAFGGGTKVEIKGATPPETGAETESPGETTGGSAESEPPGEGQVQLQESGPGLVKPSETLSLTCTVSGGSVSSGDYYWTWIRQSPGKGLEWIGHIYYSGNTNYNPSLKSRLTISIDTSKTQFSLKLSSVTAADTAIYYCVRDRVTGAFDIWGQGTMVTVSSGGGGSELVVTQEPSLTVSPGGTVTLTCRSSNGAVTSSNYANWVQQKPGQAPRGLIGGTNKRAPGTPARFSGSSLGGKAALTLSGVQPEDEAVYYCALWYPNLWVFGGGTKLTVLGATPPETGAETESPGETTGGSAESEPPGEGEVQLQESGGGIVQPGGSLKLSCAASGFTFNTYAMNWVRQAPGKGLEWVARIRSKYNNYATYYADSVKDRFTISRDDSKNTVYLQMNNLKTEDTAVYYCVRHENFGNSYVSWFAHWGQGTLVTVSSGTAEAASASGEAGRSANHTPAGLTGPPGSPAGSPTSTEEGTSESATPESGPGTSTEPSEGSAPGSPAGSPTSTEEGTSTEPSEGSAPGTSTEPSEGSAPGTSESATPESGPGSEPATSGSETPGSEPATSGSETPGSPAGSPTSTEEGTSESATPESGPGTSTEPSEGSAPGTSTEPSEGSAPGSPAGSPTSTEEGTSTEPSEGSAPGTSTEPSEGSAPGTSESATPESGPGTSTEPSEGSAPGTSESATPESGPGSEPATSGSETPGTSTEPSEGSAPGTSTEPSEGSAPGTSESATPESGPGTSESATPESGPGSPAGAAEPEA

SEQ ID NO: 911 - protein, 1175 aa, Artificial Sequence
  Description of Artificial Sequence: Synthetic polypeptide
HHHHHHSPAGSPTSTEEGTSESATPESGPGTSTEPSEGSAPGTSESATPESGPGSEPATSGSETPGTSESATPESGPGSEPATSGSETPGTSESATPESGPGTSTEPSEGSAPGSPAGSPTSTEEGTSESATPESGPGSEPATSGSETPGTSESATPESGPGSPAGSPTSTEEGSPAGSPTSTEEGTSTEPSEGSAPGTSESATPESGPGTSESATPESGPGTSESATPESGPGSEPATSGSETPGSEPATSGSETPGSPAGSPTSTEEGTSTEPSEGSAPGTSTEPSEGSAPGGSAPEAGRSANHTPAGLTGPATSGSETPGTDIQMTQSPSSLSASVGDRVTITCQASQDISNYLNWYQQKPGKAPKLLIYDASNLETGVPSRFSGSGSGTDFTFTISSLQPEDIATYFCQHFDHLPLAFGGGTKVEIKGATPPETGAETESPGETTGGSAESEPPGEGQVQLQESGPGLVKPSETLSLTCTVSGGSVSSGDYYWTWIRQSPGKGLEWIGHIYYSGNTNYNPSLKSRLTISIDTSKTQFSLKLSSVTAADTAIYYCVRDRVTGAFDIWGQGTMVTVSSGGGGSELVVTQEPSLTVSPGGTVTLTCRSSNGAVTSSNYANWVQQKPGQAPRGLIGGTNKRAPGTPARFSGSLLGGSAALTLSGVQPEDEAVYYCALWYPNLWVFGGGTKLTVLGATPPETGAETESPGETTGGSAESEPPGEGEVQLQESGGGIVQPGGSLKLSCAASGFTFNTYAMNWVRQAPGKGLEWVARIRSKYNNYATYYADSVKDRFTISRDDSKNTVYLQMNNLKTEDTAVYYCVRHENFGNSYVSWFAHWGQGTLVTVSSGTAEAASASGEAGRSANHTPAGLTGPPGSPAGSPTSTEEGTSESATPESGPGTSTEPSEGSAPGSPAGSPTSTEEGTSTEPSEGSAPGTSTEPSEGSAPGTSESATPESGPGSEPATSGSETPGSEPATSGSETPGSPAGSPTSTEEGTSESATPESGPGTSTEPSEGSAPGTSTEPSEGSAPGSPAGSPTSTEEGTSTEPSEGSAPGTSTEPSEGSAPGTSESATPESGPGTSTEPSEGSAPGTSESATPESGPGSEPATSGSETPGTSTEPSEGSAPGTSTEPSEGSAPGTSESATPESGPGTSESATPESGPGSPAGAAEPEA

SEQ ID NO: 912 - protein, 1175 aa, Artificial Sequence
  Description of Artificial Sequence: Synthetic polypeptide
HHHHHHSPAGSPTSTEEGTSESATPESGPGTSTEPSEGSAPGTSESATPESGPGSEPATSGSETPGTSESATPESGPGSEPATSGSETPGTSESATPESGPGTSTEPSEGSAPGSPAGSPTSTEEGTSESATPESGPGSEPATSGSETPGTSESATPESGPGSPAGSPTSTEEGSPAGSPTSTEEGTSTEPSEGSAPGTSESATPESGPGTSESATPESGPGTSESATPESGPGSEPATSGSETPGSEPATSGSETPGSPAGSPTSTEEGTSTEPSEGSAPGTSTEPSEGSAPGGSAPEAGRSANHTPAGLTGPATSGSETPGTDIQMTQSPSSLSASVGDRVTITCQASQDISNYLNWYQQKPGKAPKLLIYDASNLETGVPSRFSGSGSGTDFTFTISSLQPEDIATYFCQHFDHLPLAFGGGTKVEIKGATPPETGAETESPGETTGGSAESEPPGEGQVQLQESGPGLVKPSETLSLTCTVSGGSVSSGDYYWTWIRQSPGKGLEWIGHIYYSGNTNYNPSLKSRLTISIDTSKTQFSLKLSSVTAADTAIYYCVRDRVTGAFDIWGQGTMVTVSSGGGGSELVVTQEPSLTVSPGGTVTLTCRSSNGAVTSSNYANWVQQKPGQAPRGLIGGTNKRAPGTPARFSGSSLGGSAALTLSGVQPEDEAVYYCALWYPNLWVFGGGTKLTVLGATPPETGAETESPGETTGGSAESEPPGEGEVQLQESGGGIVQPGGSLKLSCAASGFTFNTYAMNWVRQAPGKGLEWVARIRSKYNNYATYYADSVKDRFTISRDDSKNTVYLQMNNLKTEDTAVYYCVRHENFGNSYVSWFAHWGQGTLVTVSSGTAEAASASGEAGRSANHTPAGLTGPPGSPAGSPTSTEEGTSESATPESGPGTSTEPSEGSAPGSPAGSPTSTEEGTSTEPSEGSAPGTSTEPSEGSAPGTSESATPESGPGSEPATSGSETPGSEPATSGSETPGSPAGSPTSTEEGTSESATPESGPGTSTEPSEGSAPGTSTEPSEGSAPGSPAGSPTSTEEGTSTEPSEGSAPGTSTEPSEGSAPGTSESATPESGPGTSTEPSEGSAPGTSESATPESGPGSEPATSGSETPGTSTEPSEGSAPGTSTEPSEGSAPGTSESATPESGPGTSESATPESGPGSPAGAAEPEA

SEQ ID NO: 913 - protein, 1175 aa, Artificial Sequence
  Description of Artificial Sequence: Synthetic polypeptide
HHHHHHSPAGSPTSTEEGTSESATPESGPGTSTEPSEGSAPGTSESATPESGPGSEPATSGSETPGTSESATPESGPGSEPATSGSETPGTSESATPESGPGTSTEPSEGSAPGSPAGSPTSTEEGTSESATPESGPGSEPATSGSETPGTSESATPESGPGSPAGSPTSTEEGSPAGSPTSTEEGTSTEPSEGSAPGTSESATPESGPGTSESATPESGPGTSESATPESGPGSEPATSGSETPGSEPATSGSETPGSPAGSPTSTEEGTSTEPSEGSAPGTSTEPSEGSAPGGSAPEAGRSANHTPAGLTGPATSGSETPGTDIQMTQSPSSLSASVGDRVTITCQASQDISNYLNWYQQKPGKAPKLLIYDASNLETGVPSRFSGSGSGTDFTFTISSLQPEDIATYFCQHFDHLPLAFGGGTKVEIKGATPPETGAETESPGETTGGSAESEPPGEGQVQLQESGPGLVKPSETLSLTCTVSGGSVSSGDYYWTWIRQSPGKGLEWIGHIYYSGNTNYNPSLKSRLTISIDTSKTQFSLKLSSVTAADTAIYYCVRDRVTGAFDIWGQGTMVTVSSGGGGSELVVTQEPSLTVSPGGTVTLTCRSSTGAVTTSNYANWVQQKPGQAPRGLIGGTNKRAPGTPARFSGSSLGGSAALTLSGVQPEDEAEYYCALWYSNLWVFGGGTKLTVLGATPPETGAETESPGETTGGSAESEPPGEGEVQLQESGGGLVQPGGSLKLSCAASGFTFNTYAMNWVRQAPGKGLEWVARIRSKYNNYATYYADSVKDRFTISRDDSKNTAYLQMNNLKTEDTAVYYCVRHGNFGNSYVSWFAYWGQGTLVTVSSGTAEAASASGEAGRSANHTPAGLTGPPGSPAGSPTSTEEGTSESATPESGPGTSTEPSEGSAPGSPAGSPTSTEEGTSTEPSEGSAPGTSTEPSEGSAPGTSESATPESGPGSEPATSGSETPGSEPATSGSETPGSPAGSPTSTEEGTSESATPESGPGTSTEPSEGSAPGTSTEPSEGSAPGSPAGSPTSTEEGTSTEPSEGSAPGTSTEPSEGSAPGTSESATPESGPGTSTEPSEGSAPGTSESATPESGPGSEPATSGSETPGTSTEPSEGSAPGTSTEPSEGSAPGTSESATPESGPGTSESATPESGPGSPAGAAEPEA

SEQ ID NO: 914 - protein, 1175 aa, Artificial Sequence
  Description of Artificial Sequence: Synthetic polypeptide
HHHHHHSPAGSPTSTEEGTSESATPESGPGTSTEPSEGSAPGTSESATPESGPGSEPATSGSETPGTSESATPESGPGSEPATSGSETPGTSESATPESGPGTSTEPSEGSAPGSPAGSPTSTEEGTSESATPESGPGSEPATSGSETPGTSESATPESGPGSPAGSPTSTEEGSPAGSPTSTEEGTSTEPSEGSAPGTSESATPESGPGTSESATPESGPGTSESATPESGPGSEPATSGSETPGSEPATSGSETPGSPAGSPTSTEEGTSTEPSEGSAPGTSTEPSEGSAPGGSAPEAGRSANHTPAGLTGPATSGSETPGTDIQMTQSPSSLSASVGDRVTITCQASQDISNYLNWYQQKPGKAPKLLIYDASNLETGVPSRFSGSGSGTDFTFTISRLQPEDTATYFCQHFDHLPLAFGGGTKVEIKGATPPETGAETESPGETTGGSAESEPPGEGQVQLQESGPGAVKPSETLSLTCTVSGGSVSSGDYYWTWIRQSPGKGLEWIGHIYYSGNTNYNPSLKSRLTISIDTSKTQFSLKLSSVTAADTATYYCVRDRVTGAFDIWGQGTAVTVSSGGGGSELVVTQEPSLTVSPGGTVTLTCRSSNGAVTSSNYANWVQQKPGQAPRGLIGGTNKRAPGTPARFSGSLLGGKAALTLSGVQPEDEAVYYCALWYPNLWVFGGGTKLTVLGATPPETGAETESPGETTGGSAESEPPGEGEVQLLESGGGIVQPGGSLKLSCAASGFTFNTYAMNWVRQAPGKGLEWVARIRSKYNNYATYYADSVKDRFTISRDDSKNTVYLQMNNLKTEDTAVYYCVRHENFGNSYVSWFAHWGQGTLVTVSSGTAEAASASGEAGRSANHTPAGLTGPPGSPAGSPTSTEEGTSESATPESGPGTSTEPSEGSAPGSPAGSPTSTEEGTSTEPSEGSAPGTSTEPSEGSAPGTSESATPESGPGSEPATSGSETPGSEPATSGSETPGSPAGSPTSTEEGTSESATPESGPGTSTEPSEGSAPGTSTEPSEGSAPGSPAGSPTSTEEGTSTEPSEGSAPGTSTEPSEGSAPGTSESATPESGPGTSTEPSEGSAPGTSESATPESGPGSEPATSGSETPGTSTEPSEGSAPGTSTEPSEGSAPGTSESATPESGPGTSESATPESGPGSPAGAAEPEA

SEQ ID NO: 915 - protein, 1175 aa, Artificial Sequence
  Description of Artificial Sequence: Synthetic polypeptide
HHHHHHSPAGSPTSTEEGTSESATPESGPGTSTEPSEGSAPGTSESATPESGPGSEPATSGSETPGTSESATPESGPGSEPATSGSETPGTSESATPESGPGTSTEPSEGSAPGSPAGSPTSTEEGTSESATPESGPGSEPATSGSETPGTSESATPESGPGSPAGSPTSTEEGSPAGSPTSTEEGTSTEPSEGSAPGTSESATPESGPGTSESATPESGPGTSESATPESGPGSEPATSGSETPGSEPATSGSETPGSPAGSPTSTEEGTSTEPSEGSAPGTSTEPSEGSAPGGSAPEAGRSANHTPAGLTGPATSGSETPGTDIQMTQSPSSLSASVGDRVTITCQASQDISNYLNWYQQKPGKAPKLLIYDASNLETGVPSRFSGSGSGTDFTFTISRLQPEDTATYFCQHFDHLPLAFGGGTKVEIKGATPPETGAETESPGETTGGSAESEPPGEGQVQLQESGPGAVKPSETLSLTCTVSGGSVSSGDYYWTWIRQSPGKGLEWIGHIYYSGNTNYNPSLKSRLTISIDTSKTQFSLKLSSVTAADTATYYCVRDRVTGAFDIWGQGTAVTVSSGGGGSELVVTQEPSLTVSPGGTVTLTCRSSNGEVTTSNYANWVQQKPGQAPRGLIGGTIKRAPGTPARFSGSLLGGKAALTLSGVQPEDEAVYYCALWYPNLWVFGGGTKLTVLGATPPETGAETESPGETTGGSAESEPPGEGEVQLLESGGGIVQPGGSLKLSCAASGFTFNTYAMNWVRQAPGKGLEWVARIRSKYNNYATYYADSVKDRFTISRDDSKNTVYLQMNNLKTEDTAVYYCVRHENFGNSYVSWFAHWGQGTLVTVSSGTAEAASASGEAGRSANHTPAGLTGPPGSPAGSPTSTEEGTSESATPESGPGTSTEPSEGSAPGSPAGSPTSTEEGTSTEPSEGSAPGTSTEPSEGSAPGTSESATPESGPGSEPATSGSETPGSEPATSGSETPGSPAGSPTSTEEGTSESATPESGPGTSTEPSEGSAPGTSTEPSEGSAPGSPAGSPTSTEEGTSTEPSEGSAPGTSTEPSEGSAPGTSESATPESGPGTSTEPSEGSAPGTSESATPESGPGSEPATSGSETPGTSTEPSEGSAPGTSTEPSEGSAPGTSESATPESGPGTSESATPESGPGSPAGAAEPEA

SEQ ID NO: 916 - protein, 1175 aa, Artificial Sequence
  Description of Artificial Sequence: Synthetic polypeptide
HHHHHHSPAGSPTSTEEGTSESATPESGPGTSTEPSEGSAPGTSESATPESGPGSEPATSGSETPGTSESATPESGPGSEPATSGSETPGTSESATPESGPGTSTEPSEGSAPGSPAGSPTSTEEGTSESATPESGPGSEPATSGSETPGTSESATPESGPGSPAGSPTSTEEGSPAGSPTSTEEGTSTEPSEGSAPGTSESATPESGPGTSESATPESGPGTSESATPESGPGSEPATSGSETPGSEPATSGSETPGSPAGSPTSTEEGTSTEPSEGSAPGTSTEPSEGSAPGGSAPEAGRSANHTPAGLTGPATSGSETPGTDIQMTQSPSSLSASVGDRVTITCQASQDISNYLNWYQQKPGKAPKLLIYDASNLETGVPSRFSGSGSGTDFTFTISRLQPEDTATYFCQHFDHLPLAFGGGTKVEIKGATPPETGAETESPGETTGGSAESEPPGEGQVQLQESGPGAVKPSETLSLTCTVSGGSVSSGDYYWTWIRQSPGKGLEWIGHIYYSGNTNYNPSLKSRLTISIDTSKTQFSLKLSSVTAADTATYYCVRDRVTGAFDIWGQGTAVTVSSGGGGSELVVTQEPSHTVSPGGTVTLTCRSSTGAVTSSNYANWVQQKPGQAPRGLIGGTIKRAPGTPARFSGSLLGGKAALTLSGVQPEDEAEYYCALWYPNLWVFGGGTKLTVLGATPPETGAETESPGETTGGSAESEPPGEGEVQLLESGGGIVQPGGSLKLSCAASGFTFNTYAMNWVRQAPGKGLEWVARIRSKYNNYATYYADSVKDRFTISRDDSKNTVYLQMNNLKTEDTAVYYCVRHENFGNSYVSWFAHWGQGTLVTVSSGTAEAASASGEAGRSANHTPAGLTGPPGSPAGSPTSTEEGTSESATPESGPGTSTEPSEGSAPGSPAGSPTSTEEGTSTEPSEGSAPGTSTEPSEGSAPGTSESATPESGPGSEPATSGSETPGSEPATSGSETPGSPAGSPTSTEEGTSESATPESGPGTSTEPSEGSAPGTSTEPSEGSAPGSPAGSPTSTEEGTSTEPSEGSAPGTSTEPSEGSAPGTSESATPESGPGTSTEPSEGSAPGTSESATPESGPGSEPATSGSETPGTSTEPSEGSAPGTSTEPSEGSAPGTSESATPESGPGTSESATPESGPGSPAGAAEPEA

SEQ ID NO: 917 - protein, 1175 aa, Artificial Sequence
  Description of Artificial Sequence: Synthetic polypeptide
HHHHHHSPAGSPTSTEEGTSESATPESGPGTSTEPSEGSAPGTSESATPESGPGSEPATSGSETPGTSESATPESGPGSEPATSGSETPGTSESATPESGPGTSTEPSEGSAPGSPAGSPTSTEEGTSESATPESGPGSEPATSGSETPGTSESATPESGPGSPAGSPTSTEEGSPAGSPTSTEEGTSTEPSEGSAPGTSESATPESGPGTSESATPESGPGTSESATPESGPGSEPATSGSETPGSEPATSGSETPGSPAGSPTSTEEGTSTEPSEGSAPGTSTEPSEGSAPGGSAPEAGRSANHTPAGLTGPATSGSETPGTDIQMTQSPSSLSASVGDRVTITCQASQDISNYLNWYQQKPGKAPKLLIYDASNLETGVPSRFSGSGSGTDFTFTISRLQPEDTATYFCQHFDHLPLAFGGGTKVEIKGATPPETGAETESPGETTGGSAESEPPGEGQVQLQESGPGAVKPSETLSLTCTVSGGSVSSGDYYWTWIRQSPGKGLEWIGHIYYSGNTNYNPSLKSRLTISIDTSKTQFSLKLSSVTAADTATYYCVRDRVTGAFDIWGQGTAVTVSSGGGGSELVVTQEPSHTVSPGGTVTLTCRSSTGEVTTSNYANWVQQKPGQAPRGLIGGTIKRAPGTPARFSGSLLGGKAALTLSGVQPEDEAEYYCALWYPNLWVFGGGTKLTVLGATPPETGAETESPGETTGGSAESEPPGEGEVQLLESGGGIVQPGGSLKLSCAASGFTFNTYAMNWVRQAPGKGLEWVARIRSKYNNYATYYADSVKDRFTISRDDSKNTVYLQMNNLKTEDTAVYYCVRHENFGNSYVSWFAHWGQGTLVTVSSGTAEAASASGEAGRSANHTPAGLTGPPGSPAGSPTSTEEGTSESATPESGPGTSTEPSEGSAPGSPAGSPTSTEEGTSTEPSEGSAPGTSTEPSEGSAPGTSESATPESGPGSEPATSGSETPGSEPATSGSETPGSPAGSPTSTEEGTSESATPESGPGTSTEPSEGSAPGTSTEPSEGSAPGSPAGSPTSTEEGTSTEPSEGSAPGTSTEPSEGSAPGTSESATPESGPGTSTEPSEGSAPGTSESATPESGPGSEPATSGSETPGTSTEPSEGSAPGTSTEPSEGSAPGTSESATPESGPGTSESATPESGPGSPAGAAEPEA

SEQ ID NO: 918 - protein, 1175 aa, Artificial Sequence
  Description of Artificial Sequence: Synthetic polypeptide
HHHHHHSPAGSPTSTEEGTSESATPESGPGTSTEPSEGSAPGTSESATPESGPGSEPATSGSETPGTSESATPESGPGSEPATSGSETPGTSESATPESGPGTSTEPSEGSAPGSPAGSPTSTEEGTSESATPESGPGSEPATSGSETPGTSESATPESGPGSPAGSPTSTEEGSPAGSPTSTEEGTSTEPSEGSAPGTSESATPESGPGTSESATPESGPGTSESATPESGPGSEPATSGSETPGSEPATSGSETPGSPAGSPTSTEEGTSTEPSEGSAPGTSTEPSEGSAPGGSAPEAGRSANHTPAGLTGPATSGSETPGTDIQMTQSPSSLSASVGDRVTITCQASQDISNYLNWYQQKPGKAPKLLIYDASNLETGVPSRFSGSGSGTDFTFTISRLQPEDTATYFCQHFDHLPLAFGGGTKVEIKGATPPETGAETESPGETTGGSAESEPPGEGQVQLQESGPGAVKPSETLSLTCTVSGGSVSSGDYYWTWIRQSPGKGLEWIGHIYYSGNTNYNPSLKSRLTISIDTSKTQFSLKLSSVTAADTATYYCVRDRVTGAFDIWGQGTAVTVSSGGGGSELVVTQEPSLTVSPGGTVTLTCRSSNGAVTSSNYANWVQQKPGQAPRGLIGGTNKRAPGTPARFSGSSLGGKAALTLSGVQPEDEAVYYCALWYPNLWVFGGGTKLTVLGATPPETGAETESPGETTGGSAESEPPGEGEVQLQESGGGIVQPGGSLKLSCAASGFTFNTYAMNWVRQAPGKGLEWVARIRSKYNNYATYYADSVKDRFTISRDDSKNTVYLQMNNLKTEDTAVYYCVRHENFGNSYVSWFAHWGQGTLVTVSSGTAEAASASGEAGRSANHTPAGLTGPPGSPAGSPTSTEEGTSESATPESGPGTSTEPSEGSAPGSPAGSPTSTEEGTSTEPSEGSAPGTSTEPSEGSAPGTSESATPESGPGSEPATSGSETPGSEPATSGSETPGSPAGSPTSTEEGTSESATPESGPGTSTEPSEGSAPGTSTEPSEGSAPGSPAGSPTSTEEGTSTEPSEGSAPGTSTEPSEGSAPGTSESATPESGPGTSTEPSEGSAPGTSESATPESGPGSEPATSGSETPGTSTEPSEGSAPGTSTEPSEGSAPGTSESATPESGPGTSESATPESGPGSPAGAAEPEA

SEQ ID NO: 919 - protein, 1175 aa, Artificial Sequence
  Description of Artificial Sequence: Synthetic polypeptide
HHHHHHSPAGSPTSTEEGTSESATPESGPGTSTEPSEGSAPGTSESATPESGPGSEPATSGSETPGTSESATPESGPGSEPATSGSETPGTSESATPESGPGTSTEPSEGSAPGSPAGSPTSTEEGTSESATPESGPGSEPATSGSETPGTSESATPESGPGSPAGSPTSTEEGSPAGSPTSTEEGTSTEPSEGSAPGTSESATPESGPGTSESATPESGPGTSESATPESGPGSEPATSGSETPGSEPATSGSETPGSPAGSPTSTEEGTSTEPSEGSAPGTSTEPSEGSAPGGSAPEAGRSANHTPAGLTGPATSGSETPGTDIQMTQSPSSLSASVGDRVTITCQASQDISNYLNWYQQKPGKAPKLLIYDASNLETGVPSRFSGSGSGTDFTFTISRLQPEDTATYFCQHFDHLPLAFGGGTKVEIKGATPPETGAETESPGETTGGSAESEPPGEGQVQLQESGPGAVKPSETLSLTCTVSGGSVSSGDYYWTWIRQSPGKGLEWIGHIYYSGNTNYNPSLKSRLTISIDTSKTQFSLKLSSVTAADTATYYCVRDRVTGAFDIWGQGTAVTVSSGGGGSELVVTQEPSLTVSPGGTVTLTCRSSNGAVTSSNYANWVQQKPGQAPRGLIGGTNKRAPGTPARFSGSLLGGSAALTLSGVQPEDEAVYYCALWYPNLWVFGGGTKLTVLGATPPETGAETESPGETTGGSAESEPPGEGEVQLQESGGGIVQPGGSLKLSCAASGFTFNTYAMNWVRQAPGKGLEWVARIRSKYNNYATYYADSVKDRFTISRDDSKNTVYLQMNNLKTEDTAVYYCVRHENFGNSYVSWFAHWGQGTLVTVSSGTAEAASASGEAGRSANHTPAGLTGPPGSPAGSPTSTEEGTSESATPESGPGTSTEPSEGSAPGSPAGSPTSTEEGTSTEPSEGSAPGTSTEPSEGSAPGTSESATPESGPGSEPATSGSETPGSEPATSGSETPGSPAGSPTSTEEGTSESATPESGPGTSTEPSEGSAPGTSTEPSEGSAPGSPAGSPTSTEEGTSTEPSEGSAPGTSTEPSEGSAPGTSESATPESGPGTSTEPSEGSAPGTSESATPESGPGSEPATSGSETPGTSTEPSEGSAPGTSTEPSEGSAPGTSESATPESGPGTSESATPESGPGSPAGAAEPEA

SEQ ID NO: 920 - protein, 1175 aa, Artificial Sequence
  Description of Artificial Sequence: Synthetic polypeptide
HHHHHHSPAGSPTSTEEGTSESATPESGPGTSTEPSEGSAPGTSESATPESGPGSEPATSGSETPGTSESATPESGPGSEPATSGSETPGTSESATPESGPGTSTEPSEGSAPGSPAGSPTSTEEGTSESATPESGPGSEPATSGSETPGTSESATPESGPGSPAGSPTSTEEGSPAGSPTSTEEGTSTEPSEGSAPGTSESATPESGPGTSESATPESGPGTSESATPESGPGSEPATSGSETPGSEPATSGSETPGSPAGSPTSTEEGTSTEPSEGSAPGTSTEPSEGSAPGGSAPEAGRSANHTPAGLTGPATSGSETPGTDIQMTQSPSSLSASVGDRVTITCQASQDISNYLNWYQQKPGKAPKLLIYDASNLETGVPSRFSGSGSGTDFTFTISRLQPEDTATYFCQHFDHLPLAFGGGTKVEIKGATPPETGAETESPGETTGGSAESEPPGEGQVQLQESGPGAVKPSETLSLTCTVSGGSVSSGDYYWTWIRQSPGKGLEWIGHIYYSGNTNYNPSLKSRLTISIDTSKTQFSLKLSSVTAADTATYYCVRDRVTGAFDIWGQGTAVTVSSGGGGSELVVTQEPSLTVSPGGTVTLTCRSSNGAVTSSNYANWVQQKPGQAPRGLIGGTNKRAPGTPARFSGSSLGGSAALTLSGVQPEDEAVYYCALWYPNLWVFGGGTKLTVLGATPPETGAETESPGETTGGSAESEPPGEGEVQLQESGGGIVQPGGSLKLSCAASGFTFNTYAMNWVRQAPGKGLEWVARIRSKYNNYATYYADSVKDRFTISRDDSKNTVYLQMNNLKTEDTAVYYCVRHENFGNSYVSWFAHWGQGTLVTVSSGTAEAASASGEAGRSANHTPAGLTGPPGSPAGSPTSTEEGTSESATPESGPGTSTEPSEGSAPGSPAGSPTSTEEGTSTEPSEGSAPGTSTEPSEGSAPGTSESATPESGPGSEPATSGSETPGSEPATSGSETPGSPAGSPTSTEEGTSESATPESGPGTSTEPSEGSAPGTSTEPSEGSAPGSPAGSPTSTEEGTSTEPSEGSAPGTSTEPSEGSAPGTSESATPESGPGTSTEPSEGSAPGTSESATPESGPGSEPATSGSETPGTSTEPSEGSAPGTSTEPSEGSAPGTSESATPESGPGTSESATPESGPGSPAGAAEPEA

SEQ ID NO: 921 - protein, 1175 aa, Artificial Sequence
  Description of Artificial Sequence: Synthetic polypeptide
HHHHHHSPAGSPTSTEEGTSESATPESGPGTSTEPSEGSAPGTSESATPESGPGSEPATSGSETPGTSESATPESGPGSEPATSGSETPGTSESATPESGPGTSTEPSEGSAPGSPAGSPTSTEEGTSESATPESGPGSEPATSGSETPGTSESATPESGPGSPAGSPTSTEEGSPAGSPTSTEEGTSTEPSEGSAPGTSESATPESGPGTSESATPESGPGTSESATPESGPGSEPATSGSETPGSEPATSGSETPGSPAGSPTSTEEGTSTEPSEGSAPGTSTEPSEGSAPGGSAPEAGRSANHTPAGLTGPATSGSETPGTDIQMTQSPSSLSASVGDRVTITCQASQDISNYLNWYQQKPGKAPKLLIYDASNLETGVPSRFSGSGSGTDFTFTISRLQPEDTATYFCQHFDHLPLAFGGGTKVEIKGATPPETGAETESPGETTGGSAESEPPGEGQVQLQESGPGAVKPSETLSLTCTVSGGSVSSGDYYWTWIRQSPGKGLEWIGHIYYSGNTNYNPSLKSRLTISIDTSKTQFSLKLSSVTAADTATYYCVRDRVTGAFDIWGQGTAVTVSSGGGGSELVVTQEPSLTVSPGGTVTLTCRSSTGAVTTSNYANWVQQKPGQAPRGLIGGTNKRAPGTPARFSGSSLGGSAALTLSGVQPEDEAEYYCALWYSNLWVFGGGTKLTVLGATPPETGAETESPGETTGGSAESEPPGEGEVQLQESGGGLVQPGGSLKLSCAASGFTFNTYAMNWVRQAPGKGLEWVARIRSKYNNYATYYADSVKDRFTISRDDSKNTAYLQMNNLKTEDTAVYYCVRHGNFGNSYVSWFAYWGQGTLVTVSSGTAEAASASGEAGRSANHTPAGLTGPPGSPAGSPTSTEEGTSESATPESGPGTSTEPSEGSAPGSPAGSPTSTEEGTSTEPSEGSAPGTSTEPSEGSAPGTSESATPESGPGSEPATSGSETPGSEPATSGSETPGSPAGSPTSTEEGTSESATPESGPGTSTEPSEGSAPGTSTEPSEGSAPGSPAGSPTSTEEGTSTEPSEGSAPGTSTEPSEGSAPGTSESATPESGPGTSTEPSEGSAPGTSESATPESGPGSEPATSGSETPGTSTEPSEGSAPGTSTEPSEGSAPGTSESATPESGPGTSESATPESGPGSPAGAAEPEA

SEQ ID NO: 922 - protein, 1459 aa, Artificial Sequence
  Description of Artificial Sequence: Synthetic polypeptide
HHHHHHSPAGSPTSTEEGTSESATPESGPGTSTEPSEGSAPGTSESATPESGPGSEPATSGSETPGTSESATPESGPGSEPATSGSETPGTSESATPESGPGTSTEPSEGSAPGSPAGSPTSTEEGTSESATPESGPGSEPATSGSETPGTSESATPESGPGSPAGSPTSTEEGSPAGSPTSTEEGTSTEPSEGSAPGTSESATPESGPGTSESATPESGPGTSESATPESGPGSEPATSGSETPGSEPATSGSETPGSPAGSPTSTEEGTSTEPSEGSAPGTSTEPSEGSAPGGSAPEAGRSANHTPAGLTGPATSGSETPGTDIQMTQSPSSLSASVGDRVTITCQASQDISNYLNWYQQKPGKAPKLLIYDASNLETGVPSRFSGSGSGTDFTFTISSLQPEDIATYFCQHFDHLPLAFGGGTKVEIKGATPPETGAETESPGETTGGSAESEPPGEGQVQLQESGPGLVKPSETLSLTCTVSGGSVSSGDYYWTWIRQSPGKGLEWIGHIYYSGNTNYNPSLKSRLTISIDTSKTQFSLKLSSVTAADTAIYYCVRDRVTGAFDIWGQGTMVTVSSGGGGSELVVTQEPSLTVSPGGTVTLTCRSSNGAVTSSNYANWVQQKPGQAPRGLIGGTNKRAPGTPARFSGSLLGGKAALTLSGVQPEDEAVYYCALWYPNLWVFGGGTKLTVLGATPPETGAETESPGETTGGSAESEPPGEGEVQLLESGGGIVQPGGSLKLSCAASGFTFNTYAMNWVRQAPGKGLEWVARIRSKYNNYATYYADSVKDRFTISRDDSKNTVYLQMNNLKTEDTAVYYCVRHENFGNSYVSWFAHWGQGTLVTVSSGTAEAASASGEAGRSANHTPAGLTGPPGSPAGSPTSTEEGTSESATPESGPGTSTEPSEGSAPGSPAGSPTSTEEGTSTEPSEGSAPGTSTEPSEGSAPGTSESATPESGPGSEPATSGSETPGSEPATSGSETPGSPAGSPTSTEEGTSESATPESGPGTSTEPSEGSAPGTSTEPSEGSAPGSPAGSPTSTEEGTSTEPSEGSAPGTSTEPSEGSAPGTSESATPESGPGTSTEPSEGSAPGTSESATPESGPGSEPATSGSETPGTSTEPSEGSAPGTSTEPSEGSAPGTSESATPESGPGTSESATPESGPGSPAGSPTSTEEGTSESATPESGPGSEPATSGSETPGTSESATPESGPGTSTEPSEGSAPGTSTEPSEGSAPGTSTEPSEGSAPGTSTEPSEGSAPGTSTEPSEGSAPGTSTEPSEGSAPGSPAGSPTSTEEGTSTEPSEGSAPGTSESATPESGPGSEPATSGSETPGTSESATPESGPGSEPATSGSETPGTSESATPESGPGTSTEPSEGSAPGTSESATPESGPGSPAGSPTSTEEGSPAGSPTSTEEGSPAGSPTSTEEGTSESATPESGPGTSTEPSEGSAPGAAEPEA

SEQ ID NO: 923 - protein, 1459 aa, Artificial Sequence
  Description of Artificial Sequence: Synthetic polypeptide
HHHHHHSPAGSPTSTEEGTSESATPESGPGTSTEPSEGSAPGTSESATPESGPGSEPATSGSETPGTSESATPESGPGSEPATSGSETPGTSESATPESGPGTSTEPSEGSAPGSPAGSPTSTEEGTSESATPESGPGSEPATSGSETPGTSESATPESGPGSPAGSPTSTEEGSPAGSPTSTEEGTSTEPSEGSAPGTSESATPESGPGTSESATPESGPGTSESATPESGPGSEPATSGSETPGSEPATSGSETPGSPAGSPTSTEEGTSTEPSEGSAPGTSTEPSEGSAPGGSAPEAGRSANHTPAGLTGPATSGSETPGTDIQMTQSPSSLSASVGDRVTITCQASQDISNYLNWYQQKPGKAPKLLIYDASNLETGVPSRFSGSGSGTDFTFTISSLQPEDIATYFCQHFDHLPLAFGGGTKVEIKGATPPETGAETESPGETTGGSAESEPPGEGQVQLQESGPGLVKPSETLSLTCTVSGGSVSSGDYYWTWIRQSPGKGLEWIGHIYYSGNTNYNPSLKSRLTISIDTSKTQFSLKLSSVTAADTAIYYCVRDRVTGAFDIWGQGTMVTVSSGGGGSELVVTQEPSLTVSPGGTVTLTCRSSNGEVTTSNYANWVQQKPGQAPRGLIGGTIKRAPGTPARFSGSLLGGKAALTLSGVQPEDEAVYYCALWYPNLWVFGGGTKLTVLGATPPETGAETESPGETTGGSAESEPPGEGEVQLLESGGGIVQPGGSLKLSCAASGFTFNTYAMNWVRQAPGKGLEWVARIRSKYNNYATYYADSVKDRFTISRDDSKNTVYLQMNNLKTEDTAVYYCVRHENFGNSYVSWFAHWGQGTLVTVSSGTAEAASASGEAGRSANHTPAGLTGPPGSPAGSPTSTEEGTSESATPESGPGTSTEPSEGSAPGSPAGSPTSTEEGTSTEPSEGSAPGTSTEPSEGSAPGTSESATPESGPGSEPATSGSETPGSEPATSGSETPGSPAGSPTSTEEGTSESATPESGPGTSTEPSEGSAPGTSTEPSEGSAPGSPAGSPTSTEEGTSTEPSEGSAPGTSTEPSEGSAPGTSESATPESGPGTSTEPSEGSAPGTSESATPESGPGSEPATSGSETPGTSTEPSEGSAPGTSTEPSEGSAPGTSESATPESGPGTSESATPESGPGSPAGSPTSTEEGTSESATPESGPGSEPATSGSETPGTSESATPESGPGTSTEPSEGSAPGTSTEPSEGSAPGTSTEPSEGSAPGTSTEPSEGSAPGTSTEPSEGSAPGTSTEPSEGSAPGSPAGSPTSTEEGTSTEPSEGSAPGTSESATPESGPGSEPATSGSETPGTSESATPESGPGSEPATSGSETPGTSESATPESGPGTSTEPSEGSAPGTSESATPESGPGSPAGSPTSTEEGSPAGSPTSTEEGSPAGSPTSTEEGTSESATPESGPGTSTEPSEGSAPGAAEPEA

SEQ ID NO: 924 - protein, 1459 aa, Artificial Sequence
  Description of Artificial Sequence: Synthetic polypeptide
HHHHHHSPAGSPTSTEEGTSESATPESGPGTSTEPSEGSAPGTSESATPESGPGSEPATSGSETPGTSESATPESGPGSEPATSGSETPGTSESATPESGPGTSTEPSEGSAPGSPAGSPTSTEEGTSESATPESGPGSEPATSGSETPGTSESATPESGPGSPAGSPTSTEEGSPAGSPTSTEEGTSTEPSEGSAPGTSESATPESGPGTSESATPESGPGTSESATPESGPGSEPATSGSETPGSEPATSGSETPGSPAGSPTSTEEGTSTEPSEGSAPGTSTEPSEGSAPGGSAPEAGRSANHTPAGLTGPATSGSETPGTDIQMTQSPSSLSASVGDRVTITCQASQDISNYLNWYQQKPGKAPKLLIYDASNLETGVPSRFSGSGSGTDFTFTISSLQPEDIATYFCQHFDHLPLAFGGGTKVEIKGATPPETGAETESPGETTGGSAESEPPGEGQVQLQESGPGLVKPSETLSLTCTVSGGSVSSGDYYWTWIRQSPGKGLEWIGHIYYSGNTNYNPSLKSRLTISIDTSKTQFSLKLSSVTAADTAIYYCVRDRVTGAFDIWGQGTMVTVSSGGGGSELVVTQEPSHTVSPGGTVTLTCRSSTGAVTSSNYANWVQQKPGQAPRGLIGGTIKRAPGTPARFSGSLLGGKAALTLSGVQPEDEAEYYCALWYPNLWVFGGGTKLTVLGATPPETGAETESPGETTGGSAESEPPGEGEVQLLESGGGIVQPGGSLKLSCAASGFTFNTYAMNWVRQAPGKGLEWVARIRSKYNNYATYYADSVKDRFTISRDDSKNTVYLQMNNLKTEDTAVYYCVRHENFGNSYVSWFAHWGQGTLVTVSSGTAEAASASGEAGRSANHTPAGLTGPPGSPAGSPTSTEEGTSESATPESGPGTSTEPSEGSAPGSPAGSPTSTEEGTSTEPSEGSAPGTSTEPSEGSAPGTSESATPESGPGSEPATSGSETPGSEPATSGSETPGSPAGSPTSTEEGTSESATPESGPGTSTEPSEGSAPGTSTEPSEGSAPGSPAGSPTSTEEGTSTEPSEGSAPGTSTEPSEGSAPGTSESATPESGPGTSTEPSEGSAPGTSESATPESGPGSEPATSGSETPGTSTEPSEGSAPGTSTEPSEGSAPGTSESATPESGPGTSESATPESGPGSPAGSPTSTEEGTSESATPESGPGSEPATSGSETPGTSESATPESGPGTSTEPSEGSAPGTSTEPSEGSAPGTSTEPSEGSAPGTSTEPSEGSAPGTSTEPSEGSAPGTSTEPSEGSAPGSPAGSPTSTEEGTSTEPSEGSAPGTSESATPESGPGSEPATSGSETPGTSESATPESGPGSEPATSGSETPGTSESATPESGPGTSTEPSEGSAPGTSESATPESGPGSPAGSPTSTEEGSPAGSPTSTEEGSPAGSPTSTEEGTSESATPESGPGTSTEPSEGSAPGAAEPEA

SEQ ID NO: 925 - protein, 1459 aa, Artificial Sequence
  Description of Artificial Sequence: Synthetic polypeptide
HHHHHHSPAGSPTSTEEGTSESATPESGPGTSTEPSEGSAPGTSESATPESGPGSEPATSGSETPGTSESATPESGPGSEPATSGSETPGTSESATPESGPGTSTEPSEGSAPGSPAGSPTSTEEGTSESATPESGPGSEPATSGSETPGTSESATPESGPGSPAGSPTSTEEGSPAGSPTSTEEGTSTEPSEGSAPGTSESATPESGPGTSESATPESGPGTSESATPESGPGSEPATSGSETPGSEPATSGSETPGSPAGSPTSTEEGTSTEPSEGSAPGTSTEPSEGSAPGGSAPEAGRSANHTPAGLTGPATSGSETPGTDIQMTQSPSSLSASVGDRVTITCQASQDISNYLNWYQQKPGKAPKLLIYDASNLETGVPSRFSGSGSGTDFTFTISSLQPEDIATYFCQHFDHLPLAFGGGTKVEIKGATPPETGAETESPGETTGGSAESEPPGEGQVQLQESGPGLVKPSETLSLTCTVSGGSVSSGDYYWTWIRQSPGKGLEWIGHIYYSGNTNYNPSLKSRLTISIDTSKTQFSLKLSSVTAADTAIYYCVRDRVTGAFDIWGQGTMVTVSSGGGGSELVVTQEPSHTVSPGGTVTLTCRSSTGEVTTSNYANWVQQKPGQAPRGLIGGTIKRAPGTPARFSGSLLGGKAALTLSGVQPEDEAEYYCALWYPNLWVFGGGTKLTVLGATPPETGAETESPGETTGGSAESEPPGEGEVQLLESGGGIVQPGGSLKLSCAASGFTFNTYAMNWVRQAPGKGLEWVARIRSKYNNYATYYADSVKDRFTISRDDSKNTVYLQMNNLKTEDTAVYYCVRHENFGNSYVSWFAHWGQGTLVTVSSGTAEAASASGEAGRSANHTPAGLTGPPGSPAGSPTSTEEGTSESATPESGPGTSTEPSEGSAPGSPAGSPTSTEEGTSTEPSEGSAPGTSTEPSEGSAPGTSESATPESGPGSEPATSGSETPGSEPATSGSETPGSPAGSPTSTEEGTSESATPESGPGTSTEPSEGSAPGTSTEPSEGSAPGSPAGSPTSTEEGTSTEPSEGSAPGTSTEPSEGSAPGTSESATPESGPGTSTEPSEGSAPGTSESATPESGPGSEPATSGSETPGTSTEPSEGSAPGTSTEPSEGSAPGTSESATPESGPGTSESATPESGPGSPAGSPTSTEEGTSESATPESGPGSEPATSGSETPGTSESATPESGPGTSTEPSEGSAPGTSTEPSEGSAPGTSTEPSEGSAPGTSTEPSEGSAPGTSTEPSEGSAPGTSTEPSEGSAPGSPAGSPTSTEEGTSTEPSEGSAPGTSESATPESGPGSEPATSGSETPGTSESATPESGPGSEPATSGSETPGTSESATPESGPGTSTEPSEGSAPGTSESATPESGPGSPAGSPTSTEEGSPAGSPTSTEEGSPAGSPTSTEEGTSESATPESGPGTSTEPSEGSAPGAAEPEA

SEQ ID NO: 926 - protein, 1459 aa, Artificial Sequence
  Description of Artificial Sequence: Synthetic polypeptide
HHHHHHSPAGSPTSTEEGTSESATPESGPGTSTEPSEGSAPGTSESATPESGPGSEPATSGSETPGTSESATPESGPGSEPATSGSETPGTSESATPESGPGTSTEPSEGSAPGSPAGSPTSTEEGTSESATPESGPGSEPATSGSETPGTSESATPESGPGSPAGSPTSTEEGSPAGSPTSTEEGTSTEPSEGSAPGTSESATPESGPGTSESATPESGPGTSESATPESGPGSEPATSGSETPGSEPATSGSETPGSPAGSPTSTEEGTSTEPSEGSAPGTSTEPSEGSAPGGSAPEAGRSANHTPAGLTGPATSGSETPGTDIQMTQSPSSLSASVGDRVTITCQASQDISNYLNWYQQKPGKAPKLLIYDASNLETGVPSRFSGSGSGTDFTFTISSLQPEDIATYFCQHFDHLPLAFGGGTKVEIKGATPPETGAETESPGETTGGSAESEPPGEGQVQLQESGPGLVKPSETLSLTCTVSGGSVSSGDYYWTWIRQSPGKGLEWIGHIYYSGNTNYNPSLKSRLTISIDTSKTQFSLKLSSVTAADTAIYYCVRDRVTGAFDIWGQGTMVTVSSGGGGSELVVTQEPSLTVSPGGTVTLTCRSSNGAVTSSNYANWVQQKPGQAPRGLIGGTNKRAPGTPARFSGSSLGGKAALTLSGVQPEDEAVYYCALWYPNLWVFGGGTKLTVLGATPPETGAETESPGETTGGSAESEPPGEGEVQLQESGGGIVQPGGSLKLSCAASGFTFNTYAMNWVRQAPGKGLEWVARIRSKYNNYATYYADSVKDRFTISRDDSKNTVYLQMNNLKTEDTAVYYCVRHENFGNSYVSWFAHWGQGTLVTVSSGTAEAASASGEAGRSANHTPAGLTGPPGSPAGSPTSTEEGTSESATPESGPGTSTEPSEGSAPGSPAGSPTSTEEGTSTEPSEGSAPGTSTEPSEGSAPGTSESATPESGPGSEPATSGSETPGSEPATSGSETPGSPAGSPTSTEEGTSESATPESGPGTSTEPSEGSAPGTSTEPSEGSAPGSPAGSPTSTEEGTSTEPSEGSAPGTSTEPSEGSAPGTSESATPESGPGTSTEPSEGSAPGTSESATPESGPGSEPATSGSETPGTSTEPSEGSAPGTSTEPSEGSAPGTSESATPESGPGTSESATPESGPGSPAGSPTSTEEGTSESATPESGPGSEPATSGSETPGTSESATPESGPGTSTEPSEGSAPGTSTEPSEGSAPGTSTEPSEGSAPGTSTEPSEGSAPGTSTEPSEGSAPGTSTEPSEGSAPGSPAGSPTSTEEGTSTEPSEGSAPGTSESATPESGPGSEPATSGSETPGTSESATPESGPGSEPATSGSETPGTSESATPESGPGTSTEPSEGSAPGTSESATPESGPGSPAGSPTSTEEGSPAGSPTSTEEGSPAGSPTSTEEGTSESATPESGPGTSTEPSEGSAPGAAEPEA

SEQ ID NO: 927 - protein, 1459 aa, Artificial Sequence
  Description of Artificial Sequence: Synthetic polypeptide
HHHHHHSPAGSPTSTEEGTSESATPESGPGTSTEPSEGSAPGTSESATPESGPGSEPATSGSETPGTSESATPESGPGSEPATSGSETPGTSESATPESGPGTSTEPSEGSAPGSPAGSPTSTEEGTSESATPESGPGSEPATSGSETPGTSESATPESGPGSPAGSPTSTEEGSPAGSPTSTEEGTSTEPSEGSAPGTSESATPESGPGTSESATPESGPGTSESATPESGPGSEPATSGSETPGSEPATSGSETPGSPAGSPTSTEEGTSTEPSEGSAPGTSTEPSEGSAPGGSAPEAGRSANHTPAGLTGPATSGSETPGTDIQMTQSPSSLSASVGDRVTITCQASQDISNYLNWYQQKPGKAPKLLIYDASNLETGVPSRFSGSGSGTDFTFTISSLQPEDIATYFCQHFDHLPLAFGGGTKVEIKGATPPETGAETESPGETTGGSAESEPPGEGQVQLQESGPGLVKPSETLSLTCTVSGGSVSSGDYYWTWIRQSPGKGLEWIGHIYYSGNTNYNPSLKSRLTISIDTSKTQFSLKLSSVTAADTAIYYCVRDRVTGAFDIWGQGTMVTVSSGGGGSELVVTQEPSLTVSPGGTVTLTCRSSNGAVTSSNYANWVQQKPGQAPRGLIGGTNKRAPGTPARFSGSLLGGSAALTLSGVQPEDEAVYYCALWYPNLWVFGGGTKLTVLGATPPETGAETESPGETTGGSAESEPPGEGEVQLQESGGGIVQPGGSLKLSCAASGFTFNTYAMNWVRQAPGKGLEWVARIRSKYNNYATYYADSVKDRFTISRDDSKNTVYLQMNNLKTEDTAVYYCVRHENFGNSYVSWFAHWGQGTLVTVSSGTAEAASASGEAGRSANHTPAGLTGPPGSPAGSPTSTEEGTSESATPESGPGTSTEPSEGSAPGSPAGSPTSTEEGTSTEPSEGSAPGTSTEPSEGSAPGTSESATPESGPGSEPATSGSETPGSEPATSGSETPGSPAGSPTSTEEGTSESATPESGPGTSTEPSEGSAPGTSTEPSEGSAPGSPAGSPTSTEEGTSTEPSEGSAPGTSTEPSEGSAPGTSESATPESGPGTSTEPSEGSAPGTSESATPESGPGSEPATSGSETPGTSTEPSEGSAPGTSTEPSEGSAPGTSESATPESGPGTSESATPESGPGSPAGSPTSTEEGTSESATPESGPGSEPATSGSETPGTSESATPESGPGTSTEPSEGSAPGTSTEPSEGSAPGTSTEPSEGSAPGTSTEPSEGSAPGTSTEPSEGSAPGTSTEPSEGSAPGSPAGSPTSTEEGTSTEPSEGSAPGTSESATPESGPGSEPATSGSETPGTSESATPESGPGSEPATSGSETPGTSESATPESGPGTSTEPSEGSAPGTSESATPESGPGSPAGSPTSTEEGSPAGSPTSTEEGSPAGSPTSTEEGTSESATPESGPGTSTEPSEGSAPGAAEPEA

SEQ ID NO: 928 - protein, 1459 aa, Artificial Sequence
  Description of Artificial Sequence: Synthetic polypeptide
HHHHHHSPAGSPTSTEEGTSESATPESGPGTSTEPSEGSAPGTSESATPESGPGSEPATSGSETPGTSESATPESGPGSEPATSGSETPGTSESATPESGPGTSTEPSEGSAPGSPAGSPTSTEEGTSESATPESGPGSEPATSGSETPGTSESATPESGPGSPAGSPTSTEEGSPAGSPTSTEEGTSTEPSEGSAPGTSESATPESGPGTSESATPESGPGTSESATPESGPGSEPATSGSETPGSEPATSGSETPGSPAGSPTSTEEGTSTEPSEGSAPGTSTEPSEGSAPGGSAPEAGRSANHTPAGLTGPATSGSETPGTDIQMTQSPSSLSASVGDRVTITCQASQDISNYLNWYQQKPGKAPKLLIYDASNLETGVPSRFSGSGSGTDFTFTISSLQPEDIATYFCQHFDHLPLAFGGGTKVEIKGATPPETGAETESPGETTGGSAESEPPGEGQVQLQESGPGLVKPSETLSLTCTVSGGSVSSGDYYWTWIRQSPGKGLEWIGHIYYSGNTNYNPSLKSRLTISIDTSKTQFSLKLSSVTAADTAIYYCVRDRVTGAFDIWGQGTMVTVSSGGGGSELVVTQEPSLTVSPGGTVTLTCRSSNGAVTSSNYANWVQQKPGQAPRGLIGGTNKRAPGTPARFSGSSLGGSAALTLSGVQPEDEAVYYCALWYPNLWVFGGGTKLTVLGATPPETGAETESPGETTGGSAESEPPGEGEVQLQESGGGIVQPGGSLKLSCAASGFTFNTYAMNWVRQAPGKGLEWVARIRSKYNNYATYYADSVKDRFTISRDDSKNTVYLQMNNLKTEDTAVYYCVRHENFGNSYVSWFAHWGQGTLVTVSSGTAEAASASGEAGRSANHTPAGLTGPPGSPAGSPTSTEEGTSESATPESGPGTSTEPSEGSAPGSPAGSPTSTEEGTSTEPSEGSAPGTSTEPSEGSAPGTSESATPESGPGSEPATSGSETPGSEPATSGSETPGSPAGSPTSTEEGTSESATPESGPGTSTEPSEGSAPGTSTEPSEGSAPGSPAGSPTSTEEGTSTEPSEGSAPGTSTEPSEGSAPGTSESATPESGPGTSTEPSEGSAPGTSESATPESGPGSEPATSGSETPGTSTEPSEGSAPGTSTEPSEGSAPGTSESATPESGPGTSESATPESGPGSPAGSPTSTEEGTSESATPESGPGSEPATSGSETPGTSESATPESGPGTSTEPSEGSAPGTSTEPSEGSAPGTSTEPSEGSAPGTSTEPSEGSAPGTSTEPSEGSAPGTSTEPSEGSAPGSPAGSPTSTEEGTSTEPSEGSAPGTSESATPESGPGSEPATSGSETPGTSESATPESGPGSEPATSGSETPGTSESATPESGPGTSTEPSEGSAPGTSESATPESGPGSPAGSPTSTEEGSPAGSPTSTEEGSPAGSPTSTEEGTSESATPESGPGTSTEPSEGSAPGAAEPEA

SEQ ID NO: 929 - protein, 1459 aa, Artificial Sequence
  Description of Artificial Sequence: Synthetic polypeptide
HHHHHHSPAGSPTSTEEGTSESATPESGPGTSTEPSEGSAPGTSESATPESGPGSEPATSGSETPGTSESATPESGPGSEPATSGSETPGTSESATPESGPGTSTEPSEGSAPGSPAGSPTSTEEGTSESATPESGPGSEPATSGSETPGTSESATPESGPGSPAGSPTSTEEGSPAGSPTSTEEGTSTEPSEGSAPGTSESATPESGPGTSESATPESGPGTSESATPESGPGSEPATSGSETPGSEPATSGSETPGSPAGSPTSTEEGTSTEPSEGSAPGTSTEPSEGSAPGGSAPEAGRSANHTPAGLTGPATSGSETPGTDIQMTQSPSSLSASVGDRVTITCQASQDISNYLNWYQQKPGKAPKLLIYDASNLETGVPSRFSGSGSGTDFTFTISSLQPEDIATYFCQHFDHLPLAFGGGTKVEIKGATPPETGAETESPGETTGGSAESEPPGEGQVQLQESGPGLVKPSETLSLTCTVSGGSVSSGDYYWTWIRQSPGKGLEWIGHIYYSGNTNYNPSLKSRLTISIDTSKTQFSLKLSSVTAADTAIYYCVRDRVTGAFDIWGQGTMVTVSSGGGGSELVVTQEPSLTVSPGGTVTLTCRSSTGAVTTSNYANWVQQKPGQAPRGLIGGTNKRAPGTPARFSGSSLGGSAALTLSGVQPEDEAEYYCALWYSNLWVFGGGTKLTVLGATPPETGAETESPGETTGGSAESEPPGEGEVQLQESGGGLVQPGGSLKLSCAASGFTFNTYAMNWVRQAPGKGLEWVARIRSKYNNYATYYADSVKDRFTISRDDSKNTAYLQMNNLKTEDTAVYYCVRHGNFGNSYVSWFAYWGQGTLVTVSSGTAEAASASGEAGRSANHTPAGLTGPPGSPAGSPTSTEEGTSESATPESGPGTSTEPSEGSAPGSPAGSPTSTEEGTSTEPSEGSAPGTSTEPSEGSAPGTSESATPESGPGSEPATSGSETPGSEPATSGSETPGSPAGSPTSTEEGTSESATPESGPGTSTEPSEGSAPGTSTEPSEGSAPGSPAGSPTSTEEGTSTEPSEGSAPGTSTEPSEGSAPGTSESATPESGPGTSTEPSEGSAPGTSESATPESGPGSEPATSGSETPGTSTEPSEGSAPGTSTEPSEGSAPGTSESATPESGPGTSESATPESGPGSPAGSPTSTEEGTSESATPESGPGSEPATSGSETPGTSESATPESGPGTSTEPSEGSAPGTSTEPSEGSAPGTSTEPSEGSAPGTSTEPSEGSAPGTSTEPSEGSAPGTSTEPSEGSAPGSPAGSPTSTEEGTSTEPSEGSAPGTSESATPESGPGSEPATSGSETPGTSESATPESGPGSEPATSGSETPGTSESATPESGPGTSTEPSEGSAPGTSESATPESGPGSPAGSPTSTEEGSPAGSPTSTEEGSPAGSPTSTEEGTSESATPESGPGTSTEPSEGSAPGAAEPEA

SEQ ID NO: 930 - protein, 1459 aa, Artificial Sequence
  Description of Artificial Sequence: Synthetic polypeptide
HHHHHHSPAGSPTSTEEGTSESATPESGPGTSTEPSEGSAPGTSESATPESGPGSEPATSGSETPGTSESATPESGPGSEPATSGSETPGTSESATPESGPGTSTEPSEGSAPGSPAGSPTSTEEGTSESATPESGPGSEPATSGSETPGTSESATPESGPGSPAGSPTSTEEGSPAGSPTSTEEGTSTEPSEGSAPGTSESATPESGPGTSESATPESGPGTSESATPESGPGSEPATSGSETPGSEPATSGSETPGSPAGSPTSTEEGTSTEPSEGSAPGTSTEPSEGSAPGGSAPEAGRSANHTPAGLTGPATSGSETPGTDIQMTQSPSSLSASVGDRVTITCQASQDISNYLNWYQQKPGKAPKLLIYDASNLETGVPSRFSGSGSGTDFTFTISRLQPEDTATYFCQHFDHLPLAFGGGTKVEIKGATPPETGAETESPGETTGGSAESEPPGEGQVQLQESGPGAVKPSETLSLTCTVSGGSVSSGDYYWTWIRQSPGKGLEWIGHIYYSGNTNYNPSLKSRLTISIDTSKTQFSLKLSSVTAADTATYYCVRDRVTGAFDIWGQGTAVTVSSGGGGSELVVTQEPSLTVSPGGTVTLTCRSSNGAVTSSNYANWVQQKPGQAPRGLIGGTNKRAPGTPARFSGSLLGGKAALTLSGVQPEDEAVYYCALWYPNLWVFGGGTKLTVLGATPPETGAETESPGETTGGSAESEPPGEGEVQLLESGGGIVQPGGSLKLSCAASGFTFNTYAMNWVRQAPGKGLEWVARIRSKYNNYATYYADSVKDRFTISRDDSKNTVYLQMNNLKTEDTAVYYCVRHENFGNSYVSWFAHWGQGTLVTVSSGTAEAASASGEAGRSANHTPAGLTGPPGSPAGSPTSTEEGTSESATPESGPGTSTEPSEGSAPGSPAGSPTSTEEGTSTEPSEGSAPGTSTEPSEGSAPGTSESATPESGPGSEPATSGSETPGSEPATSGSETPGSPAGSPTSTEEGTSESATPESGPGTSTEPSEGSAPGTSTEPSEGSAPGSPAGSPTSTEEGTSTEPSEGSAPGTSTEPSEGSAPGTSESATPESGPGTSTEPSEGSAPGTSESATPESGPGSEPATSGSETPGTSTEPSEGSAPGTSTEPSEGSAPGTSESATPESGPGTSESATPESGPGSPAGSPTSTEEGTSESATPESGPGSEPATSGSETPGTSESATPESGPGTSTEPSEGSAPGTSTEPSEGSAPGTSTEPSEGSAPGTSTEPSEGSAPGTSTEPSEGSAPGTSTEPSEGSAPGSPAGSPTSTEEGTSTEPSEGSAPGTSESATPESGPGSEPATSGSETPGTSESATPESGPGSEPATSGSETPGTSESATPESGPGTSTEPSEGSAPGTSESATPESGPGSPAGSPTSTEEGSPAGSPTSTEEGSPAGSPTSTEEGTSESATPESGPGTSTEPSEGSAPGAAEPEA

SEQ ID NO: 931 - protein, 1459 aa, Artificial Sequence
  Description of Artificial Sequence: Synthetic polypeptide
HHHHHHSPAGSPTSTEEGTSESATPESGPGTSTEPSEGSAPGTSESATPESGPGSEPATSGSETPGTSESATPESGPGSEPATSGSETPGTSESATPESGPGTSTEPSEGSAPGSPAGSPTSTEEGTSESATPESGPGSEPATSGSETPGTSESATPESGPGSPAGSPTSTEEGSPAGSPTSTEEGTSTEPSEGSAPGTSESATPESGPGTSESATPESGPGTSESATPESGPGSEPATSGSETPGSEPATSGSETPGSPAGSPTSTEEGTSTEPSEGSAPGTSTEPSEGSAPGGSAPEAGRSANHTPAGLTGPATSGSETPGTDIQMTQSPSSLSASVGDRVTITCQASQDISNYLNWYQQKPGKAPKLLIYDASNLETGVPSRFSGSGSGTDFTFTISRLQPEDTATYFCQHFDHLPLAFGGGTKVEIKGATPPETGAETESPGETTGGSAESEPPGEGQVQLQESGPGAVKPSETLSLTCTVSGGSVSSGDYYWTWIRQSPGKGLEWIGHIYYSGNTNYNPSLKSRLTISIDTSKTQFSLKLSSVTAADTATYYCVRDRVTGAFDIWGQGTAVTVSSGGGGSELVVTQEPSLTVSPGGTVTLTCRSSNGEVTTSNYANWVQQKPGQAPRGLIGGTIKRAPGTPARFSGSLLGGKAALTLSGVQPEDEAVYYCALWYPNLWVFGGGTKLTVLGATPPETGAETESPGETTGGSAESEPPGEGEVQLLESGGGIVQPGGSLKLSCAASGFTFNTYAMNWVRQAPGKGLEWVARIRSKYNNYATYYADSVKDRFTISRDDSKNTVYLQMNNLKTEDTAVYYCVRHENFGNSYVSWFAHWGQGTLVTVSSGTAEAASASGEAGRSANHTPAGLTGPPGSPAGSPTSTEEGTSESATPESGPGTSTEPSEGSAPGSPAGSPTSTEEGTSTEPSEGSAPGTSTEPSEGSAPGTSESATPESGPGSEPATSGSETPGSEPATSGSETPGSPAGSPTSTEEGTSESATPESGPGTSTEPSEGSAPGTSTEPSEGSAPGSPAGSPTSTEEGTSTEPSEGSAPGTSTEPSEGSAPGTSESATPESGPGTSTEPSEGSAPGTSESATPESGPGSEPATSGSETPGTSTEPSEGSAPGTSTEPSEGSAPGTSESATPESGPGTSESATPESGPGSPAGSPTSTEEGTSESATPESGPGSEPATSGSETPGTSESATPESGPGTSTEPSEGSAPGTSTEPSEGSAPGTSTEPSEGSAPGTSTEPSEGSAPGTSTEPSEGSAPGTSTEPSEGSAPGSPAGSPTSTEEGTSTEPSEGSAPGTSESATPESGPGSEPATSGSETPGTSESATPESGPGSEPATSGSETPGTSESATPESGPGTSTEPSEGSAPGTSESATPESGPGSPAGSPTSTEEGSPAGSPTSTEEGSPAGSPTSTEEGTSESATPESGPGTSTEPSEGSAPGAAEPEA

SEQ ID NO: 932 - protein, 1459 aa, Artificial Sequence
  Description of Artificial Sequence: Synthetic polypeptide
HHHHHHSPAGSPTSTEEGTSESATPESGPGTSTEPSEGSAPGTSESATPESGPGSEPATSGSETPGTSESATPESGPGSEPATSGSETPGTSESATPESGPGTSTEPSEGSAPGSPAGSPTSTEEGTSESATPESGPGSEPATSGSETPGTSESATPESGPGSPAGSPTSTEEGSPAGSPTSTEEGTSTEPSEGSAPGTSESATPESGPGTSESATPESGPGTSESATPESGPGSEPATSGSETPGSEPATSGSETPGSPAGSPTSTEEGTSTEPSEGSAPGTSTEPSEGSAPGGSAPEAGRSANHTPAGLTGPATSGSETPGTDIQMTQSPSSLSASVGDRVTITCQASQDISNYLNWYQQKPGKAPKLLIYDASNLETGVPSRFSGSGSGTDFTFTISRLQPEDTATYFCQHFDHLPLAFGGGTKVEIKGATPPETGAETESPGETTGGSAESEPPGEGQVQLQESGPGAVKPSETLSLTCTVSGGSVSSGDYYWTWIRQSPGKGLEWIGHIYYSGNTNYNPSLKSRLTISIDTSKTQFSLKLSSVTAADTATYYCVRDRVTGAFDIWGQGTAVTVSSGGGGSELVVTQEPSHTVSPGGTVTLTCRSSTGAVTSSNYANWVQQKPGQAPRGLIGGTIKRAPGTPARFSGSLLGGKAALTLSGVQPEDEAEYYCALWYPNLWVFGGGTKLTVLGATPPETGAETESPGETTGGSAESEPPGEGEVQLLESGGGIVQPGGSLKLSCAASGFTFNTYAMNWVRQAPGKGLEWVARIRSKYNNYATYYADSVKDRFTISRDDSKNTVYLQMNNLKTEDTAVYYCVRHENFGNSYVSWFAHWGQGTLVTVSSGTAEAASASGEAGRSANHTPAGLTGPPGSPAGSPTSTEEGTSESATPESGPGTSTEPSEGSAPGSPAGSPTSTEEGTSTEPSEGSAPGTSTEPSEGSAPGTSESATPESGPGSEPATSGSETPGSEPATSGSETPGSPAGSPTSTEEGTSESATPESGPGTSTEPSEGSAPGTSTEPSEGSAPGSPAGSPTSTEEGTSTEPSEGSAPGTSTEPSEGSAPGTSESATPESGPGTSTEPSEGSAPGTSESATPESGPGSEPATSGSETPGTSTEPSEGSAPGTSTEPSEGSAPGTSESATPESGPGTSESATPESGPGSPAGSPTSTEEGTSESATPESGPGSEPATSGSETPGTSESATPESGPGTSTEPSEGSAPGTSTEPSEGSAPGTSTEPSEGSAPGTSTEPSEGSAPGTSTEPSEGSAPGTSTEPSEGSAPGSPAGSPTSTEEGTSTEPSEGSAPGTSESATPESGPGSEPATSGSETPGTSESATPESGPGSEPATSGSETPGTSESATPESGPGTSTEPSEGSAPGTSESATPESGPGSPAGSPTSTEEGSPAGSPTSTEEGSPAGSPTSTEEGTSESATPESGPGTSTEPSEGSAPGAAEPEA

SEQ ID NO: 933 - protein, 1459 aa, Artificial Sequence
  Description of Artificial Sequence: Synthetic polypeptide
HHHHHHSPAGSPTSTEEGTSESATPESGPGTSTEPSEGSAPGTSESATPESGPGSEPATSGSETPGTSESATPESGPGSEPATSGSETPGTSESATPESGPGTSTEPSEGSAPGSPAGSPTSTEEGTSESATPESGPGSEPATSGSETPGTSESATPESGPGSPAGSPTSTEEGSPAGSPTSTEEGTSTEPSEGSAPGTSESATPESGPGTSESATPESGPGTSESATPESGPGSEPATSGSETPGSEPATSGSETPGSPAGSPTSTEEGTSTEPSEGSAPGTSTEPSEGSAPGGSAPEAGRSANHTPAGLTGPATSGSETPGTDIQMTQSPSSLSASVGDRVTITCQASQDISNYLNWYQQKPGKAPKLLIYDASNLETGVPSRFSGSGSGTDFTFTISRLQPEDTATYFCQHFDHLPLAFGGGTKVEIKGATPPETGAETESPGETTGGSAESEPPGEGQVQLQESGPGAVKPSETLSLTCTVSGGSVSSGDYYWTWIRQSPGKGLEWIGHIYYSGNTNYNPSLKSRLTISIDTSKTQFSLKLSSVTAADTATYYCVRDRVTGAFDIWGQGTAVTVSSGGGGSELVVTQEPSHTVSPGGTVTLTCRSSTGEVTTSNYANWVQQKPGQAPRGLIGGTIKRAPGTPARFSGSLLGGKAALTLSGVQPEDEAEYYCALWYPNLWVFGGGTKLTVLGATPPETGAETESPGETTGGSAESEPPGEGEVQLLESGGGIVQPGGSLKLSCAASGFTFNTYAMNWVRQAPGKGLEWVARIRSKYNNYATYYADSVKDRFTISRDDSKNTVYLQMNNLKTEDTAVYYCVRHENFGNSYVSWFAHWGQGTLVTVSSGTAEAASASGEAGRSANHTPAGLTGPPGSPAGSPTSTEEGTSESATPESGPGTSTEPSEGSAPGSPAGSPTSTEEGTSTEPSEGSAPGTSTEPSEGSAPGTSESATPESGPGSEPATSGSETPGSEPATSGSETPGSPAGSPTSTEEGTSESATPESGPGTSTEPSEGSAPGTSTEPSEGSAPGSPAGSPTSTEEGTSTEPSEGSAPGTSTEPSEGSAPGTSESATPESGPGTSTEPSEGSAPGTSESATPESGPGSEPATSGSETPGTSTEPSEGSAPGTSTEPSEGSAPGTSESATPESGPGTSESATPESGPGSPAGSPTSTEEGTSESATPESGPGSEPATSGSETPGTSESATPESGPGTSTEPSEGSAPGTSTEPSEGSAPGTSTEPSEGSAPGTSTEPSEGSAPGTSTEPSEGSAPGTSTEPSEGSAPGSPAGSPTSTEEGTSTEPSEGSAPGTSESATPESGPGSEPATSGSETPGTSESATPESGPGSEPATSGSETPGTSESATPESGPGTSTEPSEGSAPGTSESATPESGPGSPAGSPTSTEEGSPAGSPTSTEEGSPAGSPTSTEEGTSESATPESGPGTSTEPSEGSAPGAAEPEA

SEQ ID NO: 934 - protein, 1459 aa, Artificial Sequence
  Description of Artificial Sequence: Synthetic polypeptide
HHHHHHSPAGSPTSTEEGTSESATPESGPGTSTEPSEGSAPGTSESATPESGPGSEPATSGSETPGTSESATPESGPGSEPATSGSETPGTSESATPESGPGTSTEPSEGSAPGSPAGSPTSTEEGTSESATPESGPGSEPATSGSETPGTSESATPESGPGSPAGSPTSTEEGSPAGSPTSTEEGTSTEPSEGSAPGTSESATPESGPGTSESATPESGPGTSESATPESGPGSEPATSGSETPGSEPATSGSETPGSPAGSPTSTEEGTSTEPSEGSAPGTSTEPSEGSAPGGSAPEAGRSANHTPAGLTGPATSGSETPGTDIQMTQSPSSLSASVGDRVTITCQASQDISNYLNWYQQKPGKAPKLLIYDASNLETGVPSRFSGSGSGTDFTFTISRLQPEDTATYFCQHFDHLPLAFGGGTKVEIKGATPPETGAETESPGETTGGSAESEPPGEGQVQLQESGPGAVKPSETLSLTCTVSGGSVSSGDYYWTWIRQSPGKGLEWIGHIYYSGNTNYNPSLKSRLTISIDTSKTQFSLKLSSVTAADTATYYCVRDRVTGAFDIWGQGTAVTVSSGGGGSELVVTQEPSLTVSPGGTVTLTCRSSNGAVTSSNYANWVQQKPGQAPRGLIGGTNKRAPGTPARFSGSSLGGKAALTLSGVQPEDEAVYYCALWYPNLWVFGGGTKLTVLGATPPETGAETESPGETTGGSAESEPPGEGEVQLQESGGGIVQPGGSLKLSCAASGFTFNTYAMNWVRQAPGKGLEWVARIRSKYNNYATYYADSVKDRFTISRDDSKNTVYLQMNNLKTEDTAVYYCVRHENFGNSYVSWFAHWGQGTLVTVSSGTAEAASASGEAGRSANHTPAGLTGPPGSPAGSPTSTEEGTSESATPESGPGTSTEPSEGSAPGSPAGSPTSTEEGTSTEPSEGSAPGTSTEPSEGSAPGTSESATPESGPGSEPATSGSETPGSEPATSGSETPGSPAGSPTSTEEGTSESATPESGPGTSTEPSEGSAPGTSTEPSEGSAPGSPAGSPTSTEEGTSTEPSEGSAPGTSTEPSEGSAPGTSESATPESGPGTSTEPSEGSAPGTSESATPESGPGSEPATSGSETPGTSTEPSEGSAPGTSTEPSEGSAPGTSESATPESGPGTSESATPESGPGSPAGSPTSTEEGTSESATPESGPGSEPATSGSETPGTSESATPESGPGTSTEPSEGSAPGTSTEPSEGSAPGTSTEPSEGSAPGTSTEPSEGSAPGTSTEPSEGSAPGTSTEPSEGSAPGSPAGSPTSTEEGTSTEPSEGSAPGTSESATPESGPGSEPATSGSETPGTSESATPESGPGSEPATSGSETPGTSESATPESGPGTSTEPSEGSAPGTSESATPESGPGSPAGSPTSTEEGSPAGSPTSTEEGSPAGSPTSTEEGTSESATPESGPGTSTEPSEGSAPGAAEPEA

SEQ ID NO: 935 - protein, 1459 aa, Artificial Sequence
  Description of Artificial Sequence: Synthetic polypeptide
HHHHHHSPAGSPTSTEEGTSESATPESGPGTSTEPSEGSAPGTSESATPESGPGSEPATSGSETPGTSESATPESGPGSEPATSGSETPGTSESATPESGPGTSTEPSEGSAPGSPAGSPTSTEEGTSESATPESGPGSEPATSGSETPGTSESATPESGPGSPAGSPTSTEEGSPAGSPTSTEEGTSTEPSEGSAPGTSESATPESGPGTSESATPESGPGTSESATPESGPGSEPATSGSETPGSEPATSGSETPGSPAGSPTSTEEGTSTEPSEGSAPGTSTEPSEGSAPGGSAPEAGRSANHTPAGLTGPATSGSETPGTDIQMTQSPSSLSASVGDRVTITCQASQDISNYLNWYQQKPGKAPKLLIYDASNLETGVPSRFSGSGSGTDFTFTISRLQPEDTATYFCQHFDHLPLAFGGGTKVEIKGATPPETGAETESPGETTGGSAESEPPGEGQVQLQESGPGAVKPSETLSLTCTVSGGSVSSGDYYWTWIRQSPGKGLEWIGHIYYSGNTNYNPSLKSRLTISIDTSKTQFSLKLSSVTAADTATYYCVRDRVTGAFDIWGQGTAVTVSSGGGGSELVVTQEPSLTVSPGGTVTLTCRSSNGAVTSSNYANWVQQKPGQAPRGLIGGTNKRAPGTPARFSGSLLGGSAALTLSGVQPEDEAVYYCALWYPNLWVFGGGTKLTVLGATPPETGAETESPGETTGGSAESEPPGEGEVQLQESGGGIVQPGGSLKLSCAASGFTFNTYAMNWVRQAPGKGLEWVARIRSKYNNYATYYADSVKDRFTISRDDSKNTVYLQMNNLKTEDTAVYYCVRHENFGNSYVSWFAHWGQGTLVTVSSGTAEAASASGEAGRSANHTPAGLTGPPGSPAGSPTSTEEGTSESATPESGPGTSTEPSEGSAPGSPAGSPTSTEEGTSTEPSEGSAPGTSTEPSEGSAPGTSESATPESGPGSEPATSGSETPGSEPATSGSETPGSPAGSPTSTEEGTSESATPESGPGTSTEPSEGSAPGTSTEPSEGSAPGSPAGSPTSTEEGTSTEPSEGSAPGTSTEPSEGSAPGTSESATPESGPGTSTEPSEGSAPGTSESATPESGPGSEPATSGSETPGTSTEPSEGSAPGTSTEPSEGSAPGTSESATPESGPGTSESATPESGPGSPAGSPTSTEEGTSESATPESGPGSEPATSGSETPGTSESATPESGPGTSTEPSEGSAPGTSTEPSEGSAPGTSTEPSEGSAPGTSTEPSEGSAPGTSTEPSEGSAPGTSTEPSEGSAPGSPAGSPTSTEEGTSTEPSEGSAPGTSESATPESGPGSEPATSGSETPGTSESATPESGPGSEPATSGSETPGTSESATPESGPGTSTEPSEGSAPGTSESATPESGPGSPAGSPTSTEEGSPAGSPTSTEEGSPAGSPTSTEEGTSESATPESGPGTSTEPSEGSAPGAAEPEA

SEQ ID NO: 936 - protein, 1459 aa, Artificial Sequence
  Description of Artificial Sequence: Synthetic polypeptide
HHHHHHSPAGSPTSTEEGTSESATPESGPGTSTEPSEGSAPGTSESATPESGPGSEPATSGSETPGTSESATPESGPGSEPATSGSETPGTSESATPESGPGTSTEPSEGSAPGSPAGSPTSTEEGTSESATPESGPGSEPATSGSETPGTSESATPESGPGSPAGSPTSTEEGSPAGSPTSTEEGTSTEPSEGSAPGTSESATPESGPGTSESATPESGPGTSESATPESGPGSEPATSGSETPGSEPATSGSETPGSPAGSPTSTEEGTSTEPSEGSAPGTSTEPSEGSAPGGSAPEAGRSANHTPAGLTGPATSGSETPGTDIQMTQSPSSLSASVGDRVTITCQASQDISNYLNWYQQKPGKAPKLLIYDASNLETGVPSRFSGSGSGTDFTFTISRLQPEDTATYFCQHFDHLPLAFGGGTKVEIKGATPPETGAETESPGETTGGSAESEPPGEGQVQLQESGPGAVKPSETLSLTCTVSGGSVSSGDYYWTWIRQSPGKGLEWIGHIYYSGNTNYNPSLKSRLTISIDTSKTQFSLKLSSVTAADTATYYCVRDRVTGAFDIWGQGTAVTVSSGGGGSELVVTQEPSLTVSPGGTVTLTCRSSNGAVTSSNYANWVQQKPGQAPRGLIGGTNKRAPGTPARFSGSSLGGSAALTLSGVQPEDEAVYYCALWYPNLWVFGGGTKLTVLGATPPETGAETESPGETTGGSAESEPPGEGEVQLQESGGGIVQPGGSLKLSCAASGFTFNTYAMNWVRQAPGKGLEWVARIRSKYNNYATYYADSVKDRFTISRDDSKNTVYLQMNNLKTEDTAVYYCVRHENFGNSYVSWFAHWGQGTLVTVSSGTAEAASASGEAGRSANHTPAGLTGPPGSPAGSPTSTEEGTSESATPESGPGTSTEPSEGSAPGSPAGSPTSTEEGTSTEPSEGSAPGTSTEPSEGSAPGTSESATPESGPGSEPATSGSETPGSEPATSGSETPGSPAGSPTSTEEGTSESATPESGPGTSTEPSEGSAPGTSTEPSEGSAPGSPAGSPTSTEEGTSTEPSEGSAPGTSTEPSEGSAPGTSESATPESGPGTSTEPSEGSAPGTSESATPESGPGSEPATSGSETPGTSTEPSEGSAPGTSTEPSEGSAPGTSESATPESGPGTSESATPESGPGSPAGSPTSTEEGTSESATPESGPGSEPATSGSETPGTSESATPESGPGTSTEPSEGSAPGTSTEPSEGSAPGTSTEPSEGSAPGTSTEPSEGSAPGTSTEPSEGSAPGTSTEPSEGSAPGSPAGSPTSTEEGTSTEPSEGSAPGTSESATPESGPGSEPATSGSETPGTSESATPESGPGSEPATSGSETPGTSESATPESGPGTSTEPSEGSAPGTSESATPESGPGSPAGSPTSTEEGSPAGSPTSTEEGSPAGSPTSTEEGTSESATPESGPGTSTEPSEGSAPGAAEPEA

SEQ ID NO: 937 - protein, 1459 aa, Artificial Sequence
  Description of Artificial Sequence: Synthetic polypeptide
HHHHHHSPAGSPTSTEEGTSESATPESGPGTSTEPSEGSAPGTSESATPESGPGSEPATSGSETPGTSESATPESGPGSEPATSGSETPGTSESATPESGPGTSTEPSEGSAPGSPAGSPTSTEEGTSESATPESGPGSEPATSGSETPGTSESATPESGPGSPAGSPTSTEEGSPAGSPTSTEEGTSTEPSEGSAPGTSESATPESGPGTSESATPESGPGTSESATPESGPGSEPATSGSETPGSEPATSGSETPGSPAGSPTSTEEGTSTEPSEGSAPGTSTEPSEGSAPGGSAPEAGRSANHTPAGLTGPATSGSETPGTDIQMTQSPSSLSASVGDRVTITCQASQDISNYLNWYQQKPGKAPKLLIYDASNLETGVPSRFSGSGSGTDFTFTISRLQPEDTATYFCQHFDHLPLAFGGGTKVEIKGATPPETGAETESPGETTGGSAESEPPGEGQVQLQESGPGAVKPSETLSLTCTVSGGSVSSGDYYWTWIRQSPGKGLEWIGHIYYSGNTNYNPSLKSRLTISIDTSKTQFSLKLSSVTAADTATYYCVRDRVTGAFDIWGQGTAVTVSSGGGGSELVVTQEPSLTVSPGGTVTLTCRSSTGAVTTSNYANWVQQKPGQAPRGLIGGTNKRAPGTPARFSGSSLGGSAALTLSGVQPEDEAEYYCALWYSNLWVFGGGTKLTVLGATPPETGAETESPGETTGGSAESEPPGEGEVQLQESGGGLVQPGGSLKLSCAASGFTFNTYAMNWVRQAPGKGLEWVARIRSKYNNYATYYADSVKDRFTISRDDSKNTAYLQMNNLKTEDTAVYYCVRHGNFGNSYVSWFAYWGQGTLVTVSSGTAEAASASGEAGRSANHTPAGLTGPPGSPAGSPTSTEEGTSESATPESGPGTSTEPSEGSAPGSPAGSPTSTEEGTSTEPSEGSAPGTSTEPSEGSAPGTSESATPESGPGSEPATSGSETPGSEPATSGSETPGSPAGSPTSTEEGTSESATPESGPGTSTEPSEGSAPGTSTEPSEGSAPGSPAGSPTSTEEGTSTEPSEGSAPGTSTEPSEGSAPGTSESATPESGPGTSTEPSEGSAPGTSESATPESGPGSEPATSGSETPGTSTEPSEGSAPGTSTEPSEGSAPGTSESATPESGPGTSESATPESGPGSPAGSPTSTEEGTSESATPESGPGSEPATSGSETPGTSESATPESGPGTSTEPSEGSAPGTSTEPSEGSAPGTSTEPSEGSAPGTSTEPSEGSAPGTSTEPSEGSAPGTSTEPSEGSAPGSPAGSPTSTEEGTSTEPSEGSAPGTSESATPESGPGSEPATSGSETPGTSESATPESGPGSEPATSGSETPGTSESATPESGPGTSTEPSEGSAPGTSESATPESGPGSPAGSPTSTEEGSPAGSPTSTEEGSPAGSPTSTEEGTSESATPESGPGTSTEPSEGSAPGAAEPEA

SEQ ID NO: 938 - protein, 264 aa, Artificial Sequence
  Description of Artificial Sequence: Synthetic polypeptide
ELVVTQEPSHTVSPGGTVTLTCRSSTGAVTSSNYANWVQQKPGQAPRGLIGGTIKRAPGTPARFSGSLLGGKAALTLSGVQPEDEAEYYCALWYPNLWVFGGGTKLTVLGATPPETGAETESPGETTGGSAESEPPGEGEVQLLESGGGIVQPGGSLKLSCAASGFTFNTYAMNWVRQAPGKGLEWVARIRSKYNNYATYYADSVKDRFTISRDDSKNTVYLQMNNLKTEDTAVYYCVRHENFGNSYVSWFAHWGQGTLVTVSS

SEQ ID NO: 939 - protein, 264 aa, Artificial Sequence
  Description of Artificial Sequence: Synthetic polypeptide
ELVVTQEPSHTVSPGGTVTLTCRSSTGEVTTSNYANWVQQKPGQAPRGLIGGTIKRAPGTPARFSGSLLGGKAALTLSGVQPEDEAEYYCALWYPNLWVFGGGTKLTVLGATPPETGAETESPGETTGGSAESEPPGEGEVQLLESGGGIVQPGGSLKLSCAASGFTFNTYAMNWVRQAPGKGLEWVARIRSKYNNYATYYADSVKDRFTISRDDSKNTVYLQMNNLKTEDTAVYYCVRHENFGNSYVSWFAHWGQGTLVTVSS

SEQ ID NO: 940 - protein, 23 aa, Artificial Sequence
  Description of Artificial Sequence: Synthetic peptide
MKKNIAFLLASMFVFSIATNAYA

SEQ ID NO: 941 - protein, 912 aa, Artificial Sequence
  Description of Artificial Sequence: Synthetic polypeptide
MKNPEQAEEQAEEQREETGKPIPNPLLGLDSTEGTSTEPSEGSAPGTSESATPESGPGTSESATPESGPGTSESATPESGPGSEPATSGSETPGSEPATSGSETPGSPAGSPTSTEEGTSTEPSEGSAPGTSTEPSEGSAPGSEPATSGSETPGTSESATPESGPGTAEAASASGEAGRSANHEPLGLVATPGSPAGSPTSTEEGTSESATPESGPGTSTEPSEGSAPGSPAGSPTSTEEGTSTEPSEGSAPGTSTEPSEGSAPGTSESATPESGPGSEPATSGSETPGSEPATSGSETPGSPAGSPTSTEEGTSESATPESGPGTSTEPSEGSAPGTSTEPSEGSAPGSPAGSPTSTEEGTSTEPSEGSAPGTSTEPSEGSAPGTSESATPESGPGTSTEPSEGSAPGTSESATPESGPGSEPATSGSETPGTSTEPSEGSAPGTSTEPSEGSAPGTSESATPESGPGTSESATPESGPGSPAGSPTSTEEGTSESATPESGPGSEPATSGSETPGTSESATPESGPGTSTEPSEGSAPGTSTEPSEGSAPGTSTEPSEGSAPGTSTEPSEGSAPGTSTEPSEGSAPGTSTEPSEGSAPGSPAGSPTSTEEGTSTEPSEGSAPGTSESATPESGPGSEPATSGSETPGTSESATPESGPGSEPATSGSETPGTSESATPESGPGTSTEPSEGSAPGTSESATPESGPGSPAGSPTSTEEGSPAGSPTSTEEGSPAGSPTSTEEGTSESATPESGPGTSTEPSEGSAPGTSESATPESGPGSEPATSGSETPGTSESATPESGPGSEPATSGSETPGTSESATPESGPGTSTEPSEGSAPGSPAGSPTSTEEGTSESATPESGPGSEPATSGSETPGTSESATPESGPGSPAGSPTSTEEGSPAHHHHHHHH

SEQ ID NO: 942 - protein, 16 aa, Artificial Sequence
  Description of Artificial Sequence: Synthetic peptide
LAGRSDNHVPLSLSMG

SEQ ID NO: 943 - protein, 16 aa, Artificial Sequence
  Description of Artificial Sequence: Synthetic peptide
LAGRSDNHEPLELVAG

SEQ ID NO: 944 - protein, 16 aa, Artificial Sequence
  Description of Artificial Sequence: Synthetic peptide
LSGRSDNHSPLGLAGS

SEQ ID NO: 945 - protein, 16 aa, Artificial Sequence
  Description of Artificial Sequence: Synthetic peptide
LAGRSDNHSPLGLAGS

SEQ ID NO: 946 - protein, 1423 aa, Artificial Sequence
  Description of Artificial Sequence: Synthetic polypeptide
DIQMTQSPSSLSASVGDRVTITCKASQDVSIGVAWYQQKPGKAPKLLIYSASYRYTGVPSRFSGSGSGTDFTLTISSLQPEDFATYYCQQYYIYPYTFGQGTKVEIKGATPPETGAETESPGETTGGSAESEPPGEGEVQLVESGGGLVQPGGSLRLSCAASGFTFTDYTMDWVRQAPGKGLEWVADVNPNSGGSIYNQRFKGRFTLSVDRSKNTLYLQMNSLRAEDTAVYYCARNLGPSFYFDYWGQGTLVTVSSGGGGSELVVTQEPSLTVSPGGTVTLTCRSSTGAVTTSNYANWVQQKPGQAPRGLIGGTNKRAPGTPARFSGSLLGGKAALTLSGVQPEDEAEYYCALWYSNLWVFGGGTKLTVLGATPPETGAETESPGETTGGSAESEPPGEGEVQLLESGGGLVQPGGSLKLSCAASGFTFNTYAMNWVRQAPGKGLEWVARIRSKYNNYATYYADSVKDRFTISRDDSKNTAYLQMNNLKTEDTAVYYCVRHGNFGNSYVSWFAYWGQGTLVTVSSGTAEAASASGLSGRSDNHSPLGLAGSPGSPAGSPTSTEEGTSESATPESGPGTSTEPSEGSAPGSPAGSPTSTEEGTSTEPSEGSAPGTSTEPSEGSAPGTSESATPESGPGSEPATSGSETPGSEPATSGSETPGSPAGSPTSTEEGTSESATPESGPGTSTEPSEGSAPGTSTEPSEGSAPGSPAGSPTSTEEGTSTEPSEGSAPGTSTEPSEGSAPGTSESATPESGPGTSTEPSEGSAPGTSESATPESGPGSEPATSGSETPGTSTEPSEGSAPGTSTEPSEGSAPGTSESATPESGPGTSESATPESGPGSPAGSPTSTEEGTSESATPESGPGSEPATSGSETPGTSESATPESGPGTSTEPSEGSAPGTSTEPSEGSAPGTSTEPSEGSAPGTSTEPSEGSAPGTSTEPSEGSAPGTSTEPSEGSAPGSPAGSPTSTEEGTSTEPSEGSAPGTSESATPESGPGSEPATSGSETPGTSESATPESGPGSEPATSGSETPGTSESATPESGPGTSTEPSEGSAPGTSESATPESGPGSPAGSPTSTEEGSPAGSPTSTEEGSPAGSPTSTEEGTSESATPESGPGTSTEPSEGSAPGTSESATPESGPGSEPATSGSETPGTSESATPESGPGSEPATSGSETPGTSESATPESGPGTSTEPSEGSAPGSPAGSPTSTEEGTSESATPESGPGSEPATSGSETPGTSESATPESGPGSPAGSPTSTEEGSPAGSPTSTEEGTSTEPSEGSAPGTSESATPESGPGTSESATPESGPGTSESATPESGPGSEPATSGSETPGSEPATSGSETPGSPAGSPTSTEEGTSTEPSEGSAPGTSTEPSEGSAPGSEPATSGSETPGTSESATPESGPGTSTEPSEGSAPGHHHHHH

SEQ ID NO: 947 - protein, 1422 aa, Artificial Sequence; identical to SEQ ID NO: 846
  Description of Artificial Sequence: Synthetic polypeptide

SEQ ID NO: 948 - protein, 1743 aa, Artificial Sequence
  Description of Artificial Sequence: Synthetic polypeptide
HHHHHHSPAGSPTSTEEGTSESATPESGPGTSTEPSEGSAPGTSESATPESGPGSEPATSGSETPGTSESATPESGPGSEPATSGSETPGTSESATPESGPGTSTEPSEGSAPGSPAGSPTSTEEGTSESATPESGPGSEPATSGSETPGTSESATPESGPGSPAGSPTSTEEGSPAGSPTSTEEGTSTEPSEGSAPGTSESATPESGPGTSESATPESGPGTSESATPESGPGSEPATSGSETPGSEPATSGSETPGSPAGSPTSTEEGTSTEPSEGSAPGTSTEPSEGSAPGGSAPEAGRSANHTPAGLTGPATSGSETPGTDIQMTQSPSSLSASVGDRVTITCKASQDVSIGVAWYQQKPGKAPKLLIYSASYRYTGVPSRFSGSGSGTDFTLTISSLQPEDFATYYCQQYYIYPYTFGQGTKVEIKGATPPETGAETESPGETTGGSAESEPPGEGEVQLVESGGGLVQPGGSLRLSCAASGFTFTDYTMDWVRQAPGKGLEWVADVNPNSGGSIYNQRFKGRFTLSVDRSKNTLYLQMNSLRAEDTAVYYCARNLGPSFYFDYWGQGTLVTVSSGGGGSELVVTQEPSLTVSPGGTVTLTCRSSNGAVTSSNYANWVQQKPGQAPRGLIGGTNKRAPGTPARFSGSLLGGKAALTLSGVQPEDEAVYYCALWYPNLWVFGGGTKLTVLGATPPETGAETESPGETTGGSAESEPPGEGEVQLLESGGGIVQPGGSLKLSCAASGFTFNTYAMNWVRQAPGKGLEWVARIRSKYNNYATYYADSVKDRFTISRDDSKNTVYLQMNNLKTEDTAVYYCVRHENFGNSYVSWFAHWGQGTLVTVSSGTAEAASACGEAGRSANHTPAGLTGPPGSPAGSPTSTEEGTSESATPESGPGTSTEPSEGSAPGSPAGSPTSTEEGTSTEPSEGSAPGTSTEPSEGSAPGTSESATPESGPGSEPATSGSETPGSEPATSGSETPGSPAGSPTSTEEGTSESATPESGPGTSTEPSEGSAPGTSTEPSEGSAPGSPAGSPTSTEEGTSTEPSEGSAPGTSTEPSEGSAPGTSESATPESGPGTSTEPSEGSAPGTSESATPESGPGSEPATSGSETPGTSTEPSEGSAPGTSTEPSEGSAPGTSESATPESGPGTSESATPESGPGSPAGSPTSTEEGTSESATPESGPGSEPATSGSETPGTSESATPESGPGTSTEPSEGSAPGTSTEPSEGSAPGTSTEPSEGSAPGTSTEPSEGSAPGTSTEPSEGSAPGTSTEPSEGSAPGSPAGSPTSTEEGTSTEPSEGSAPGTSESATPESGPGSEPATSGSETPGTSESATPESGPGSEPATSGSETPGTSESATPESGPGTSTEPSEGSAPGTSESATPESGPGSPAGSPTSTEEGSPAGSPTSTEEGSPAGSPTSTEEGTSESATPESGPGTSTEPSEGSAPGTSESATPESGPGSEPATSGSETPGTSESATPESGPGSEPATSGSETPGTSESATPESGPGTSTEPSEGSAPGSPAGSPTSTEEGTSESATPESGPGSEPATSGSETPGTSESATPESGPGSPAGSPTSTEEGSPAGSPTSTEEGTSTEPSEGSAPGTSESATPESGPGTSESATPESGPGTSESATPESGPGSEPATSGSETPGSEPATSGSETPGSPAGSPTSTEEGTSTEPSEGSAPGTSTEPSEGSAPGSEPATSGSETPGTSESATPESGPGTSTEPSEGAAEPEA

What is claimed is:

1. A polypeptide comprising an antibody binding fragment (AF1), wherein the AF1 comprises light chain complementarity-determining regions (CDR-L), heavy chain complementarity-determining regions (CDR-H), light chain framework regions (FR-L), and heavy chain framework regions (FR-H), and wherein the AF1:
a. specifically binds to epidermal growth factor receptor (EGFR);
b. comprises a variable heavy (VH) amino acid sequence having at least 90% sequence identity to an amino acid sequence of SEQ ID NO: 28-32; and
c. comprises a variable light (VL) amino acid sequence having at least 90% sequence identity to an amino acid sequence of SEQ ID NO: 25- 27.

2. (canceled)

3. (canceled)

4. The polypeptide of claim 1, wherein the AF1 exhibits an isoelectric point (pI) that is at least 0.1 pH units higher the pI of the antigen binding fragment consisting of a sequence shown in SEQ ID NO:52.

5. The polypeptide of claim 1, wherein the AF1 is incorporated into the polypeptide to form an anti-EGFR bispecific antibody, wherein the polypeptide exhibits a higher pI relative to a control bispecific antibody, wherein said polypeptide comprises said AF1 and a reference antigen binding fragment that binds to a cluster of differentiation 3 T cell receptor (CD3), and wherein said control bispecific antigen binding fragment is identical to the polypeptide except that the AF1 is replaced with SEQ ID NO:52-.

6-25. (canceled)

26. The polypeptide of any one of the preceding claims, further comprising a first release segment peptide (RS1), wherein the RS1 is a substrate for cleavage by a mammalian protease selected from the group consisting of legumain, MMP-2, MMP-7, MMP-9, MMP-11, MMP-14, uPA, and matriptase and has an amino acid sequence having at least 90% sequence identity to a sequence selected form any one of SEQ ID NOs: 53-671.

27-29. (canceled)

30. The polypeptide of any one of the preceding claims, further comprising a first extended recombinant polypeptide (XTEN1) wherein the XTEN1 is characterized in that
it has at least about 36 amino acids;
at least 90% of its the amino acid residues are selected from glycine (G), alanine (A), serine (S), threonine (T), glutamate (E) and proline (P);
it has at least 4-6 different amino acids selected from G, A, S, T, E and P; and
it comprises at least three of the amino acid sequences of SEQ ID NOS:672-675 and/or comprises an amino acid sequence at least about 90% identical to a sequence selected from any one of SEQ ID NOS: 676-734 .

31-33. (canceled)

34. The polypeptide of any one of the preceding claims, wherein the AF1 is a chimeric or a humanized antigen binding fragment and optionally is selected from the group consisting of Fv, Fab, Fab′, Fab′-SH, linear antibody, and single-chain variable fragment (scFv).

35. (canceled)

36. The polypeptide of any one of the preceding claims expressed as a fusion protein, wherein the fusion protein, in an uncleaved state, has a structural arrangement from N-terminus to C-terminus of AF1-RS1-XTEN1 or XTEN1-RS1-AF1.

37. The polypeptide of any one of the preceding claims, further comprising a second antigen binding fragment (AF2) that specifically binds to cluster of differentiation 3 T cell receptor (CD3) or a CD3 complex subunit selected from any one of CD3 epsilon, CD3 delta, CD3 gamma, CD3 zeta, CD3 alpha and CD3 beta epsilon.

38-40. (canceled)

41. The polypeptide of claim 37, wherein the AF2 comprises light chain complementarity-determining regions (CDR-L) and heavy chain complementarity-determining regions (CDR-H), and wherein the AF2 comprises:
a CDR-H1 having the amino acid sequence of SEQ ID NO: 742,
a CDR-H2 having the amino acid sequence of SEQ ID NO: 743,
a CDR-H3 having the amino acid sequence of SEQ ID NO: 744,
a CDR-L1 having an amino acid sequence of SEQ ID NOS: 735 or 736,
a CDR-L2 having an amino acid sequence of SEQ ID NOS: 738 or 739, and
a CDR-L3 having an amino acid sequence of SEQ ID NO:740.

42. (canceled)

43. The polypeptide of claim 41, wherein the AF2 further comprises light chain framework regions (FR-L) and heavy chain framework regions (FR-H) wherein AF2 comprises:
a FR-L1 having an amino acid sequence of SEQ ID NO:746;
a FR-L2 having an amino acid sequence of SEQ ID NO:747;
a FR-L3 having an amino acid sequence of any one of SEQ ID NOS:748-751;
a FR-L4 having an amino acid sequence of SEQ ID NO:754;
a FR-H1 having an amino acid sequence of SEQ ID NO:755 or SEQ ID NO:756;
a FR-H2 having an amino acid sequence of SEQ ID NO:759;
a FR-H3 having an amino acid sequence of SEQ ID NO:760; and
a FR-H4 having an amino acid sequence of any one of SEQ ID NO:764.

44-47. (canceled)

48. The polypeptide of claim 27, wherein the AF2 comprises a variable heavy (VH) amino acid sequence having at least 90% sequence identity to an amino acid sequence of SEQ ID NOs: 766, 769, 773, or 775 and wherein the AF2 comprises a variable light (VL) amino acid sequence having at least 90%, sequence identity or is identical to an amino acid sequence of any one of SEQ ID NOs: 765, 767, 768, 770, 771, 772, or 774.

49. (canceled)

50. The polypeptide of claim 37, wherein the AF2 comprises an amino acid sequence having at least 95% sequence identity to an amino acid sequence of any one of SEQ ID NOS:776-780.

51-55. (canceled)

56. The polypeptide of claim 37, wherein the AF2 is fused to the AF1 by a flexible peptide linker, and wherein the flexible linker comprises 2 or 3 amino acids selected from the group consisting of glycine, serine, and proline.

57. (canceled)

58. The polypeptide of claim 37, wherein (1) the AF2 fragment is selected from the group consisting of Fv, Fab, Fab′, Fab′-SH, linear antibody, a single domain antibody, and single-chain variable fragment (scFv), or (2) the AF1 and AF2 are configured as an (Fab′)2 or a single chain diabody.

59-64. (canceled)

65. The polypeptide of claim 37, further comprising a second release segment (RS2), wherein the RS2 is a substrate for cleavage by a mammalian protease selected from the group consisting of legumain, MMP-2, MMP-7, MMP-9, MMP-11, MMP-14, uPA, and matriptase.

66-70. (canceled)

71. The polypeptide of claim 65, further comprising a second extended recombinant polypeptide (XTEN2) wherein the XTEN2 is characterized in that
it has at least about 36 amino acids;
at least 90% of the amino acid residues of its sequence are selected from glycine (G), alanine (A), serine (S), threonine (T), glutamate (E) and proline (P); and
it has at least 4-6 different amino acids selected from G, A, S, T, E and P.

72. The polypeptide of claim 71, wherein the XTEN2 comprises an amino acid sequence that comprises at least three of the amino acid sequences selected from SEQ ID NOs: 672-675 and/or wherein the XTEN2 comprises an amino acid sequence having at least 90% identity to a sequence selected from SEQ ID NOS: 676-734.

73. (canceled)

74. (canceled)

75. The polypeptide of claim 71, wherein the polypeptide has a structural arrangement from N-terminus to C-terminus as follows: XTEN1-RS1-AF1-AF2-RS2-XTEN2, XTEN1-RS1-AF2-AF1-RS2-XTEN2, XTEN2-RS2-AF2-AF1-RS1-XTEN1, XTEN2-RS2-AF1-AF2-RS1-XTEN1, XTEN2-RS2-diabody-RS1-XTEN1, or XTEN1-RS1-diabody-RS2-XTEN2, wherein the diabody comprises VL and VH of the AF1 and AF2, wherein the AF2 specifically binds CD3 and AF1 specifically binds EGFR, and wherein XTEN 1 and XTEN2 are of the same or different amino acid length or sequence.

76. (canceled)

77. A pharmaceutical composition comprising the polypeptide of any one of the preceding claims and one or more pharmaceutically suitable excipients.

78-81. (canceled)

82. Use of the polypeptide comprising the polypeptide of any one of the preceding claims in the preparation of a medicament for the treatment of a disease in a subject, wherein the disease is selected from the group of cancers consisting of anaplastic and medullary thyroid cancers, appendiceal cancer, arrhenoblastoma, biliary tract carcinoma, bladder cancer, breast cancer, cancers of the bile duct, carcinoid tumor, cervical cancer, cholangiocarcinoma, colon cancer, colorectal cancer, craniopharyngioma, endometrial cancer, epithelial intraperitoneal malignancy with malignant ascites, esophageal cancer, Ewing sarcoma, fallopian tube cancer, follicular cancer, gall bladder cancer, gastric cancer, gastrointestinal stromal tumor (GIST), GE-junction cancer, genito-urinary tract cancer, glioma, glioblastoma, head and neck cancer, hepatoblastoma, hepatocarcinoma, HR+ and HER2+ breast cancer, Hurthle cell cancer, Inflammatory breast cancer, Kaposi sarcoma, kidney cancer, laryngeal cancer, liposarcoma, liver cancer, lung cancer, medulloblastoma, melanoma, Merkel cell carcinoma, neuroblastoma, neuroblastoma, neuroendocrine cancer, non-small cell lung cancer, osteosarcoma (bone cancer), ovarian cancer, ovarian cancer with malignant ascites, pancreatic cancer, pancreatic neuroendocrine tumor, papillary cancer, parathyroid cancer, peritoneal carcinomatosis, peritoneal mesothelioma, primitive neuroectodermal tumor, prostate cancer, retinoblastoma, rhabdomyosarcoma, salivary gland carcinoma, sarcoma, skin cancer, small cell lung cancer, small intestine cancer, stomach cancer, testicular cancer, thyroid cancer, triple negative breast cancer, urothelial cancer, uterine cancer, uterine serous carcinoma, vaginal cancer, vulvar cancer, and Wilms tumor.

83-89. (canceled)

90. An isolated nucleic acid, the nucleic acid comprising (a) a polynucleotide encoding a polypeptide of any one of the preceding claims; or (b) the complement of the polynucleotide of (a).

91-147. (canceled)
